(19) United States
(12) Patent Application Publication
(10) Pub. No.: US 2021/0284702 A1
(43) Pub. Date: Sep. 16, 2021

(54) FUSION PROTEINS COMPRISING PROGRANULIN

(71) Applicant: Denali Therapeutics Inc., South San Francisco, CA (US)

(72) Inventors: Gilbert Di Paolo, South San Francisco, CA (US); Todd P. Logan, South San Francisco, CA (US); Kathryn M. Monroe, South San Francisco, CA (US); Ankita Srivastava, South San Francisco, CA (US); Bettina Van Lengerich, South San Francisco, CA (US)

(73) Assignee: Denali Therapeutics Inc., South San Francisco, CA (US)

(21) Appl. No.: 17/253,391

(22) PCT Filed: Jun. 18, 2019
(86) PCT No.: PCT/US2019/037695

§ 371 Date: Dec. 17, 2020

Related U.S. Application Data
(60) Provisional application No. 62/746,338, filed on Oct. 16, 2018.
(60) Provisional application No. 62/686,579, filed on Jun. 18, 2018.

(51) Int. Cl. C07K 14/475

(52) U.S. Cl. CPC C07K 14/475; A61K 38/00

(57) ABSTRACT

Provided herein are fusion proteins that comprise progranulin and an Fc polypeptide. Methods of using such proteins to treat progranulin-associated disorders (e.g., a neurodegenerative disease, such as frontotemporal dementia (FTD)) are also provided herein.

### CROSS-REFERENCE TO RELATED APPLICATIONS

[0001] This application claims priority to U.S. Provisional Application No. 62/686,579, filed Jun. 18, 2018, and U.S. Provisional Application No. 62/746,338, filed Oct. 16, 2018, the disclosures of which are hereby incorporated by reference in their entirety for all purposes.

### BACKGROUND

[0002] Frontotemporal dementia (FTD) is a progressive neurodegenerative disorder which accounts for 5-10% of all patients with dementia and 10-20% of patients with an onset of dementia before 65 years (Rademakers et al., Nat Rev Neurol. 8(8):423-34, 2012). While several genes have been linked to FTD, one of the most frequently mutated genes in FTD is GRN, which maps to human chromosome 17q21 and encodes the cysteine-rich protein progranulin (PGRN) (also known as proepithelin and acrogranin). Highly-penetrant mutations in GRN were first reported in 2006 as a cause of autosomal dominant forms of familial FTD (Baker et al., Nature. 442(7105):916-9, 2006; Cruts et al., Nature. 2006 Aug. 24; 442(7105):920-4; Gass et al., Hum Mol Genet. 15(20):2988-3001, 2006). Recent estimates suggest that GRN mutations account for 5-20% of FTD patients with positive family history and 1-5% of sporadic cases (Rademakers et al., supra).

### DESCRIPTION

[0003] Provided herein are fusion proteins comprising a progranulin polypeptide or a variant thereof and methods of use thereof for treating progranulin-associated disorders (e.g., a neurodegenerative disease, such as frontotemporal dementia (FTD)).

[0004] An aspect of the disclosure includes a protein comprising: (a) a modified Fc polypeptide dimer that specifically binds TfR; and (b) a progranulin polypeptide. In some embodiments, the protein is used in therapy. In some embodiments, the protein is used in the treatment of a neurodegenerative disease.

[0005] Another aspect of the disclosure includes a protein comprising: (a) an Fc polypeptide; and (b) a progranulin polypeptide. In some embodiments of this aspect, the Fc polypeptide: (i) does not include a variable domain, (ii) includes a hinge or partial hinge region, and/or (iii) includes modifications such that the Fc polypeptide specifically binds transferrin receptor.

[0006] In another aspect, provided herein is a protein comprising: (a) a single progranulin polypeptide or a variant thereof; (b) a first Fc polypeptide that is linked to the progranulin polypeptide or the variant thereof of (a); and (c) a second Fc polypeptide that forms an Fc dimer with the first Fc polypeptide. In some embodiments, the first Fc polypeptide and/or the second Fc polypeptide does not include an immunoglobulin heavy and/or light chain variable region sequence or an antigen-binding portion thereof. The protein can comprise exactly one progranulin polypeptide or a variant thereof.

[0007] In some embodiments of this aspect, the progranulin polypeptide comprises an amino acid sequence having greater than 90% identity, or at least 95% identity to the amino acid sequence of SEQ ID NO:212. In certain embodiments, the progranulin polypeptide comprises the amino acid sequence of SEQ ID NO:212.

[0008] In some embodiments, the first Fc polypeptide is linked to the progranulin polypeptide or the variant thereof by a peptide bond or by a polypeptide linker. In some embodiments, the polypeptide linker is 1 to 50, 1 to 25, 1 to 20, or 1 to 10 amino acids in length. For example, the polypeptide linker may be 3 to 50, 3 to 25, 5 to 50, 5 to 25, 5 to 20, or 10 to 25 amino acids in length. In some embodiments, the polypeptide linker is a flexible polypeptide linker. The flexible polypeptide linker may be a glycine-rich linker, e.g., G₄S (SEQ ID NO:277) or (G₄S)₂ (SEQ ID NO:276).

[0009] In some embodiments, the N-terminus or the C-terminus of the first Fc polypeptide is linked to the progranulin polypeptide.

[0010] In another aspect, provided herein is a protein comprising: (a) a first Fc polypeptide that is linked to a first progranulin polypeptide or a variant thereof; and (b) a second Fc polypeptide that is linked to a second progranulin polypeptide or a variant thereof, wherein the first Fc polypeptide and the second Fc polypeptide form an Fc dimer and wherein the first Fc polypeptide and/or the second Fc polypeptide specifically binds to a transferrin receptor.

[0011] In some embodiments of this aspect, the first Fc polypeptide and/or the second Fc polypeptide does not include an immunoglobulin heavy and/or light chain variable region sequence or an antigen-binding portion thereof.

[0012] In some embodiments, each of the first and second progranulin polypeptides comprises an amino acid sequence having greater 90%, or at least 95% identity to the amino acid sequence of SEQ ID NO:212. In certain embodiments, each of the first and second progranulin polypeptides comprises the amino acid sequence of SEQ ID NO:212.

[0013] In some embodiments, the first Fc polypeptide is linked to the first progranulin polypeptide or the variant thereof by a peptide bond or by a polypeptide linker and wherein the second Fc polypeptide is linked to the second progranulin polypeptide or the variant thereof by a peptide bond or by a polypeptide linker. In some embodiments, the polypeptide linker is 1 to 50, 1 to 25, 1 to 20, or 1 to 10 amino acids in length. For example, the polypeptide linker may be 3 to 50, 3 to 25, 5 to 50, 5 to 25, 5 to 20, or 10 to 25 amino acids in length. In some embodiments, the polypeptide linker is a flexible polypeptide linker. The flexible polypeptide linker may be a glycine-rich linker, e.g., G₄S (SEQ ID NO:277) or (G₄S)₂ (SEQ ID NO:276). In some embodiments, the first Fc polypeptide and/or the second Fc polypeptide does not include an immunoglobulin heavy and/or light chain variable region sequence or an antigen-binding portion thereof.

[0014] In some embodiments, the N-terminus or the C-terminus of the first Fc polypeptide is linked to the first progranulin polypeptide, and the N-terminus or the C-terminus of the second Fc polypeptide is linked to the second progranulin polypeptide.

[0015] In some embodiments, the N-terminus of the first Fc polypeptide is linked to the C-terminus of the first progranulin polypeptide, and the N-terminus of the second Fc polypeptide is linked to the C-terminus of the second progranulin polypeptide.

[0016] In some embodiments, the N-terminus of the first Fc polypeptide is linked to the C-terminus of the first progranulin polypeptide, and the C-terminus of the second Fc polypeptide is linked to the N-terminus of the second progranulin polypeptide.

[0017] In some embodiments, the C-terminus of the first Fc polypeptide is linked to the N-terminus of the first progranulin polypeptide, and the C-terminus of the second Fc polypeptide is linked to the N-terminus of the second progranulin polypeptide.

[0018] In some embodiments of the previous two aspects, the first Fc polypeptide is a modified Fc polypeptide and/or the second Fc polypeptide is a modified Fc polypeptide. In some embodiments, the first Fc polypeptide and the second Fc polypeptide each contain modifications that promote heterodimerization. In some embodiments, the Fc dimer is an Fc heterodimer.

[0019] In some embodiments of the previous two aspects, one of the Fc polypeptides has a T366W substitution and the other Fc polypeptide has T366S, L368A, and Y407V substitutions, according to EU numbering. In some embodiments, the first Fc polypeptide contains the T366S, L368A, and Y407V substitutions and the second Fc polypeptide contains the T366W substitution.

[0020] In some embodiments of the first aspect, the first Fc polypeptide is linked to the progranulin polypeptide and comprises the amino acid sequence of any one of SEQ ID NOS:213, 214, 225, and 226, and the second Fc polypeptide comprises the amino acid sequence of SEQ ID NO:261.

[0021] In some embodiments of the second aspect, the first Fc polypeptide is linked to the first progranulin polypeptide and comprises the amino acid sequence of any one of SEQ ID NOS:213, 214, 225, and 226, and the second Fc polypeptide is linked to the second progranulin polypeptide and comprises the amino acid sequence of any one of SEQ ID NOS:237, 238, 249, and 250.

[0022] In some embodiments of the previous two aspects, the first Fc polypeptide contains the T366W substitution and the second Fc polypeptide contains the T366S, L368A, and Y407V substitutions.

[0023] In some embodiments of the first aspect, the first Fc polypeptide is linked to the progranulin polypeptide and comprises the amino acid sequence of any one of SEQ ID NOS:237, 238, 249, and 250, and the second Fc polypeptide comprises the sequence of SEQ ID NO:267.

[0024] In some embodiments of the second aspect, the first Fc polypeptide is linked to the first progranulin polypeptide and comprises the amino acid sequence of any one of SEQ ID NOS:237, 238, 249, and 250, and the second Fc polypeptide is linked to the second progranulin polypeptide and comprises the amino acid sequence of any one of SEQ ID NOS:213, 214, 225, and 226.

[0025] In some embodiments, the first Fc polypeptide and/or the second Fc polypeptide comprises a native FcRn binding site.

[0026] In some embodiments, the first Fc polypeptide and the second Fc polypeptide do not have effector function.

[0027] In some embodiments, the first Fc polypeptide and/or the second Fc polypeptide includes a modification that reduces effector function. In certain embodiments, the modification that reduces effector function is the substitutions of Ala at position 234 and Ala at position 235, according to EU numbering.

[0028] In some embodiments, the first Fc polypeptide and/or the second Fc polypeptide comprises amino acid changes relative to the native Fc sequence that extend serum half-life. In certain embodiments, the amino acid changes comprise substitutions of Leu at position 428 and Ser at position 434, according to EU numbering. In certain embodiments, the amino acid changes comprise a substitution of Ser or Ala at position 434, according to EU numbering.

[0029] In some embodiments, the first Fc polypeptide and/or the second Fc polypeptide specifically binds to a transferrin receptor. In certain embodiments, the first Fc polypeptide and/or the second Fc polypeptide binds to the apical domain of the transferrin receptor.

[0030] In some embodiments, the first Fc polypeptide and/or the second Fc polypeptide comprises at least two substitutions at positions selected from the group consisting of 384, 386, 387, 388, 389, 390, 413, 416, and 421, according to EU numbering. In some embodiments, the first Fc polypeptide and/or the second Fc polypeptide includes substitutions at least three, four, five, six, seven, eight, or nine of the positions. In some embodiments, the first Fc polypeptide and/or the second Fc polypeptide further comprises one, two, three, or four substitutions at positions comprising 380, 391, 392, and 415, according to EU numbering. In certain embodiments, the first Fc polypeptide and/or the second Fc polypeptide further comprises one, two, or three substitutions at positions comprising 414, 424, and 426, according to EU numbering. In particular embodiments, the first Fc polypeptide and/or the second Fc polypeptide comprises Trp at position 388. In some embodiments, the first Fc polypeptide and/or the second Fc polypeptide comprises an aromatic amino acid at position 421 (e.g., Trp or Phe at position 421).

[0031] In some embodiments, the first Fc polypeptide and/or the second Fc polypeptide comprises at least one position selected from the following: position 380 is Trp, Leu, or Glu; position 384 is Tyr or Phe; position 386 is Thr; position 387 is Glu; position 388 is Trp; position 389 is Ser, Ala, Val, or Asn; position 390 is Ser or Asn; position 413 is Thr or Ser; position 415 is Glu or Ser; position 416 is Glu; and position 421 is Phe.

[0032] In some embodiments, the first Fc polypeptide and/or the second Fc polypeptide comprises 2, 3, 4, 5, 6, 7, 8, 9, 10, or 11 positions selected from the following: position 380 is Tip, Leu, or Glu; position 384 is Tyr or Phe; position 386 is Thr; position 387 is Glu; position 388 is Trp; position 389 is Ser, Ala, Val, or Asn; position 390 is Ser or Asn; position 413 is Thr or Ser; position 415 is Glu or Ser; position 416 is Glu; and position 421 is Phe. In certain embodiments, the first Fc polypeptide and/or the second Fc polypeptide comprises 11 positions as follows: position 380 is Trp, Leu, or Glu; position 384 is Tyr or Phe; position 386 is Thr; position 387 is Glu; position 388 is Trp; position 389 is Ser, Ala, Val, or Asn; position 390 is Ser or Asn; position 413 is Thr or Ser; position 415 is Glu or Ser; position 416 is Glu; and position 421 is Phe.

[0033] In some embodiments, the first Fc polypeptide and/or the second Fc polypeptide has a CH3 domain with at least 85% identity, at least 90% identity, or at least 95% identity to amino acids 111-217 of any one of SEQ ID NOS:34-38, 58, 60-90, 136, and 137-210.

[0034] In certain embodiments, the residues at least 5, 6, 7, 8, 9, 10, 11, 12, 13, 14, 15, or 16 of the positions corresponding to EU index positions 380, 384, 386, 387, 388, 389, 390, 391, 392, 413, 414, 415, 416, 421, 424 and 426 of any one of SEQ ID NOS:34-38, 58, 60-90, 136, and 137-210 are not deleted or substituted. In some embodiments, the first Fc polypeptide and/or the second Fc polypeptide comprises the amino acid sequence of any one of SEQ ID NOS:136-210. In certain embodiments, the first Fc polypeptide and/or the second Fc polypeptide comprises the amino acid sequence of any one of SEQ ID NOS:136, 138, 150, 162, 174, 186, and 198. In certain embodiments, the first Fc polypeptide and/or the second Fc polypeptide comprises the amino acid sequence of SEQ ID NO:150. In certain embodiments, the first Fc polypeptide and/or the second Fc polypeptide comprises the amino acid sequence of SEQ ID NO:136.

[0035] In some embodiments, the binding of the protein to the transferrin receptor does not substantially inhibit binding of transferrin to the transferrin receptor.

[0036] In some embodiments, the first Fc polypeptide and/or the second Fc polypeptide has an amino acid sequence identity of at least 75%, or at least 80%, 85%, 90%, 92%, or 95%, as compared to the corresponding wild-type Fc polypeptide. The corresponding wild-type Fc polypeptide may be a human IgG1, IgG2, IgG3, or IgG4 Fc polypeptide.

[0037] In some embodiments, uptake of the progranulin polypeptide into the brain is at least ten-fold greater as compared to the uptake of the progranulin polypeptide in the absence of the first Fc polypeptide and/or the second Fc polypeptide or as compared to the uptake of the progranulin polypeptide without the modifications to the first Fc polypeptide and/or the second Fc polypeptide that result in transferrin receptor binding.

[0038] In some embodiments, the first Fc polypeptide is not modified to bind to a blood-brain barrier receptor and the second Fc polypeptide is modified to specifically bind to a transferrin receptor. In some embodiments, the first Fc polypeptide is modified to specifically bind to a transferrin receptor and the second Fc polypeptide is not modified to bind to a blood-brain barrier receptor.

[0039] In some embodiments, the progranulin polypeptide or the variant thereof binds to sortilin or prosaposin. In particular embodiments, the progranulin polypeptide or the variant thereof binds to sortilin.

[0040] In another aspect, provided herein is a protein comprising: (a) a first Fc polypeptide that is linked to a progranulin polypeptide through a polypeptide linker; and (b) a second Fc polypeptide that forms an Fc dimer with the first Fc polypeptide, wherein the first Fc polypeptide comprises hole mutations T366S, L368A, and Y407V and the second Fc polypeptide comprises a knob mutation T366W, according to EU numbering scheme.

[0041] In some embodiments, (a) comprises the sequence of any one of SEQ ID NOS:213, 214, 225, and 226 and (b) comprises the sequence of SEQ ID NO:261.

[0042] In some embodiments, the second Fc polypeptide further comprises TfR-binding mutations.

[0043] In some embodiments, (a) comprises the sequence of any one of SEQ ID NOS:213, 214, 225, and 226 and (b) comprises the sequence of SEQ ID NO:273.

[0044] In another aspect, provided herein is a protein comprising: (a) a first Fc polypeptide that is linked to a progranulin polypeptide through a polypeptide linker; and (b) a second Fc polypeptide that forms an Fc dimer with the first Fc polypeptide, wherein the first Fc polypeptide comprises a knob mutation T366W and the second Fc polypeptide comprises hole mutations T366S, L368A, and Y407V, according to EU numbering scheme.

[0045] In some embodiments, (a) comprises the sequence of any one of SEQ ID NOS:237, 238, 249, and 250 and (b) comprises the sequence of SEQ ID NO:267.

[0046] In some embodiments, the first Fc polypeptide further comprises TfR-binding mutations.

[0047] In some embodiments, (a) comprises the sequence of SEQ ID NO:274 or 275 and (b) comprises the sequence of SEQ ID NO:267.

[0048] In another aspect, provided herein is a protein comprising: (a) a first Fc polypeptide that is linked to a first progranulin polypeptide through a polypeptide linker; and (b) a second Fc polypeptide that is linked to a second progranulin polypeptide through a polypeptide linker, wherein the first and second Fc polypeptides form an Fc dimer, the first Fc polypeptide comprises hole mutations T366S, L368A, and Y407V, the second Fc polypeptide comprises a knob mutation T366W, and wherein the N-terminus of the first progranulin polypeptide is linked to the C-terminus of the first Fc polypeptide through the polypeptide linker and the N-terminus of the second progranulin polypeptide is linked to the C-terminus of the second Fc polypeptide through the polypeptide linker.

[0049] In some embodiments, (a) comprises the sequence of SEQ ID NO:213 or 214 and (b) comprises the sequence of SEQ ID NO:237 or 238.

[0050] In some embodiments, the second Fc polypeptide further comprises TfR-binding mutations.

[0051] In some embodiments, (a) comprises the sequence of SEQ ID NO:213 or 214 and (b) comprises the sequence of SEQ ID NO:274.

[0052] In another aspect, provided herein is a protein comprising: (a) a first Fc polypeptide that is linked to a first progranulin polypeptide through a polypeptide linker; and (b) a second Fc polypeptide that is linked to a second progranulin polypeptide through a polypeptide linker, wherein the first and second Fc polypeptides form an Fc dimer, the first Fc polypeptide comprises hole mutations T366S, L368A, and Y407V, the second Fc polypeptide comprises a knob mutation T366W, and wherein the C-terminus of the first progranulin polypeptide is linked to the N-terminus of the first Fc polypeptide through the polypeptide linker and the C-terminus of the second progranulin polypeptide is linked to the N-terminus of the second Fc polypeptide through the polypeptide linker.

[0053] In some embodiments, (a) comprises the sequence of SEQ ID NO:225 or 226 and (b) comprises the sequence of SEQ ID NO:249 or 250.

[0054] In some embodiments, the second Fc polypeptide further comprises TfR-binding mutations.

[0055] In some embodiments, (a) comprises the sequence of SEQ ID NO:225 or 226 and (b) comprises the sequence of SEQ ID NO:275.

[0056] In another aspect, provided herein is a protein comprising: (a) a first Fc polypeptide that is linked to a first progranulin polypeptide through a polypeptide linker; and (b) a second Fc polypeptide that is linked to a second progranulin polypeptide through a polypeptide linker, wherein the first and second Fc polypeptides form an Fc dimer, the first Fc polypeptide comprises hole mutations T366S, L368A, and Y407V, the second Fc polypeptide comprises a knob mutation T366W, and wherein the N-terminus of the first progranulin polypeptide is linked to the C-terminus of the first Fc polypeptide through the polypeptide linker and the C-terminus of the second progranulin polypeptide is linked to the N-terminus of the second Fc polypeptide through the polypeptide linker.

[0057] In some embodiments, (a) comprises the sequence of SEQ ID NO:213 or 214 and (b) comprises the sequence of SEQ ID NO:249 or 250.

[0058] In some embodiments, the second Fc polypeptide further comprises TfR-binding mutations.

[0059] In some embodiments, (a) comprises the sequence of SEQ ID NO:213 or 214 and (b) comprises the sequence of SEQ ID NO:275.

[0060] In another aspect, provided herein is a protein comprising: (a) a first Fc polypeptide that is linked to a progranulin polypeptide through a polypeptide linker; and (b) a second Fc polypeptide that forms an Fc dimer with the first Fc polypeptide, wherein the first Fc polypeptide comprises hole mutations T366S, L368A, and Y407V and the second Fc polypeptide comprises a knob mutation T366W, according to EU numbering scheme, and TfR-binding mutations.

[0061] In some embodiments of this aspect, (a) comprises the sequence of any one of SEQ ID NOS:213, 214, 225, and 226 and (b) comprises the sequence of SEQ ID NO:281.

[0062] In some embodiments of this aspect, (a) comprises the sequence of any one of SEQ ID NOS:213, 214, 225, and 226 and (b) comprises the sequence of SEQ ID NO:286.

[0063] In some embodiments of this aspect, the second Fc polypeptide further comprises L234A and L235A mutations with or without P329G mutation, and/or M428L and N434S mutations, according to EU numbering scheme. In particular embodiments, (a) comprises the sequence of any one of SEQ ID NOS:213, 214, 225, and 226 and (b) comprises the sequence of any one of SEQ ID NOS:210 and 282-285. In particular embodiments, (a) comprises the sequence of any one of SEQ ID NOS:213, 214, 225, and 226 and (b) comprises the sequence of any one of SEQ ID NOS:209 and 287-290. In particular embodiments, (a) comprises the sequence of any one of SEQ ID NOS:213, 214, 225, and 226 and (b) comprises the sequence of SEQ ID NO: 291.

[0064] In some embodiments of this aspect, the first Fc polypeptide further comprises L234A and L235A mutations with or without P329G mutation, and/or M428L and N434S mutations, according to EU numbering scheme. In particular embodiments, (a) comprises the sequence of any one of SEQ ID NOS:215-224 and 227-236 and (b) comprises the sequence of SEQ ID NO:281. In particular embodiments, (a) comprises the sequence of any one of SEQ ID NOS:215-224 and 227-236 and (b) comprises the sequence of SEQ ID NO:286.

[0065] In some embodiments of this aspect, each of the first and second Fc polypeptides further comprises L234A and L235A mutations with or without P329G mutation, and/or M428L and N434S mutations, according to EU numbering scheme. In particular embodiments, (a) comprises the sequence of any one of SEQ ID NOS:215-224 and 227-236 and (b) comprises the sequence of SEQ ID NO:210 and 282-285. In particular embodiments, (a) comprises the sequence of any one of SEQ ID NOS:215-224 and 227-236 and (b) comprises the sequence of SEQ ID NO:209 and 287-290. In particular embodiments, (a) comprises the sequence of any one of SEQ ID NOS:215-224 and 227-236 and (b) comprises the sequence of SEQ ID NO:291.

[0066] In particular embodiments, (a) comprises the sequence of SEQ ID NO:215 and (b) comprises the sequence of SEQ ID NO:210. In particular embodiments, (a) comprises the sequence of SEQ ID NO:227 and (b) comprises the sequence of SEQ ID NO:210. In particular embodiments, (a) comprises the sequence of SEQ ID NO:215 and (b) comprises the sequence of SEQ ID NO:291. In particular embodiments, (a) comprises the sequence of SEQ ID NO:227 and (b) comprises the sequence of SEQ ID NO:291.

[0067] In another aspect, provided herein is a polypeptide comprising an Fc polypeptide that is linked to a progranulin polypeptide or a variant thereof, wherein the Fc polypeptide contains one or more modifications that promote its heterodimerization to another Fc polypeptide.

[0068] In some embodiments, the progranulin polypeptide comprises an amino acid sequence having greater than 90%, or at least 95% identity to the amino acid sequence of SEQ ID NO:212. In certain embodiments, the progranulin polypeptide comprises the amino acid sequence of SEQ ID NO:212.

[0069] In some embodiments, the Fc polypeptide is linked to the progranulin polypeptide or the variant thereof by a peptide bond or by a polypeptide linker. In some embodiments, the polypeptide linker is 1 to 50, 1 to 25, 1 to 20, or 1 to 10 amino acids in length. For example, the polypeptide linker may be 3 to 50, 3 to 25, 5 to 50, 5 to 25, 5 to 20, or 10 to 25 amino acids in length. In certain embodiments, the polypeptide linker is a flexible polypeptide linker. The flexible polypeptide linker may be a glycine-rich linker (e.g., G₄S (SEQ ID NO:277) or (G₄S)₂ (SEQ ID NO:276)).

[0070] In some embodiments, the N-terminus or the C-terminus of the Fc polypeptide is linked to the progranulin polypeptide.

[0071] In some embodiments, the Fc polypeptide contains T366S, L368A, and Y407V substitutions, according to EU numbering.

[0072] In some embodiments, the polypeptide comprises the amino acid sequence of any one of SEQ ID NOS:213, 214, 225, and 226.

[0073] In certain embodiments, the Fc polypeptide contains a T366W substitution.

[0074] In some embodiments, the polypeptide comprises the amino acid sequence of any one of SEQ ID NOS:237, 238, 249, and 250.

[0075] In some embodiments, the Fc polypeptide comprises a modification that reduces effector function. In certain embodiments, the modification that reduces effector function is the substitutions of Ala at position 234 and Ala at position 235, according to EU numbering.

[0076] In some embodiments, the polypeptide comprises the amino acid sequence of any one of SEQ ID NOS:215, 216, 227, 228, 239, 240, 251, and 252.

[0077] In some embodiments, the Fc polypeptide comprises amino acid changes relative to the native Fc sequence that extend serum half-life. In some embodiments, the amino acid changes comprise substitutions of Leu at position 428 and Ser at position 434, according to EU numbering.

[0078] In some embodiments, the polypeptide comprises the amino acid sequence of any one of SEQ ID NOS:219-222, 231-234, 243-246, and 255-258.

[0079] In some embodiments, the Fc polypeptide further comprises TfR-binding mutations.

[0080] In some embodiments, the progranulin polypeptide or the variant thereof binds to sortilin or prosaposin. In particular embodiments, the progranulin polypeptide or the variant thereof binds to sortilin.

[0081] In another aspect, provided herein is a method of treating a progranulin-associated disorder, the method comprising administering a protein or polypeptide disclosed herein to a patient in need thereof, wherein the progranulin-associated disorder is selected from the group consisting of a neurodegenerative disease, atherosclerosis, a disorder associated with TDP-43, and age-related macular degeneration (AMD).

[0082] In another aspect, provided herein is a method of increasing the amount of a progranulin polypeptide or a variant thereof in a patient having a progranulin-associated disorder, the method comprising administering a protein or polypeptide disclosed herein to the patient, wherein the progranulin-associated disorder is selected from the group consisting of a neurodegenerative disease, atherosclerosis, a disorder associated with TDP-43, and age-related macular degeneration (AMD).

[0083] In another aspect, provided herein is a method of decreasing cathepsin D activity in a patient having a progranulin-associated disorder, the method comprising administering a protein or polypeptide disclosed herein to the patient, wherein the progranulin-associated disorder is selected from the group consisting of a neurodegenerative disease, atherosclerosis, a disorder associated with TDP-43, and age-related macular degeneration (AMD).

[0084] In another aspect, provided herein is a method of increasing lysosomal degradation in a patient having a progranulin-associated disorder, the method comprising administering a protein or polypeptide disclosed herein to the patient, wherein the progranulin-associated disorder is selected from the group consisting of a neurodegenerative disease, atherosclerosis, a disorder associated with TDP-43, and age-related macular degeneration (AMD).

[0085] In some embodiments of the methods described herein, the progranulin-associated disorder is a neurodegenerative disease. In some embodiments of the methods described herein, the neurodegenerative disease is selected from the group consisting of frontotemporal dementia (FTD), neuronal ceroid lipofuscinosis (NCL), Niemann-Pick disease type A (NPA), Niemann-Pick disease type B (NPB), Niemann-Pick disease type C (NPC), C9ORF72-associated amyotrophic lateral sclerosis (ALS)/FTD, sporadic ALS, Alzheimer's disease (AD), Gaucher's disease (e.g., Gaucher's disease types 2 and 3), and Parkinson's disease. In some embodiments, the neurodegenerative disease is frontotemporal dementia (FTD).

[0086] In some embodiments, the patient has a mutation in a gene encoding the progranulin polypeptide.

[0087] In another aspect, provided herein is a pharmaceutical composition comprising any of the proteins described herein or any of the peptides described herein and a pharmaceutically acceptable carrier.

[0088] In another aspect, provided is a method for evaluating a compound or monitoring a subject's response to a compound, pharmaceutical composition, or dosing regimen thereof (e.g., response to a Fc dimer:PGRN fusion protein described herein) for treating a progranulin-associated disorder, the method comprising: (a) measuring an abundance of one or more bis(monoacylglycero)phosphate (BMP) species in a test sample from a subject having a progranulin-associated disorder, wherein the test sample or subject has been treated with the compound or pharmaceutical composition thereof (e.g., treated with a Fc dimer:PGRN fusion protein described herein); (b) comparing the difference in abundance between the one or more BMP species measured in (a) and one or more reference values; and (c) determining from the comparison whether the compound, pharmaceutical composition, or dosing regimen thereof (e.g., a Fc dimer:PGRN fusion protein described herein) improves one or more BMP species levels for treating a progranulin-associated disorder.

[0089] In some embodiments, the methods provided herein further comprise treating another test sample or subject with another compound and selecting a candidate compound that improves the one or more BMP species levels.

[0090] In some embodiments, the methods provided herein further comprise (d) maintaining or adjusting the amount or frequency of administration of the compound (e.g., a Fc dimer:PGRN fusion protein described herein) to the test sample or subject; and (e) administering the compound to the test sample or to the subject.

[0091] In another aspect, provided is a method for identifying a subject having, or at risk of having, a progranulin-associated disorder, the method comprising: (a) measuring the abundance of one or more BMP species in a test sample from the subject; (b) comparing the difference in abundance between the one or more BMP species measured in (a) and one or more reference values; and (c) determining from the comparison whether the subject has a progranulin-associated disorder.

[0092] In some embodiments, the methods provided herein further comprise administering to the subject a compound (e.g., a Fc dimer:PGRN fusion protein described herein) for improving the one or more BMP species levels for treating a progranulin-associated disorder. In some embodiments, at least one of the one or more signs or symptoms of a progranulin-associated disorder are ameliorated following treatment.

[0093] In some embodiments, treatment comprises administering progranulin, a derivative thereof, or a pharmaceutical composition thereof (e.g., administering a Fc dimer:PGRN fusion protein described herein) to the subject. In some embodiments, the progranulin derivative contains a chemical moiety or peptide fragment that allows the progranulin to cross the blood brain barrier (e.g., a progranulin derivative such as a Fc dimer:PGRN fusion protein described herein). In some embodiments, treatment comprises administering a library of compounds to a plurality of subjects or test samples.

[0094] In some embodiments, the reference value is measured in a reference sample obtained from a reference subject or a population of reference subjects. In some embodiments, the reference value is the abundance of the one or more BMP species measured in a reference sample. In some embodiments, the reference sample is the same type of cell, tissue, or fluid as the test sample. In some embodiments, at least two reference values from different types of cell, tissue, or fluid is measured.

[0095] In some embodiments, the reference sample is a healthy control. In some embodiments, the reference subject or population of reference subjects do not have a progranulin-associated disorder or a decreased level of progranulin. In particular embodiments, the reference subject or population of reference subjects do not have any signs or symptoms of such a disorder.

[0096] In some embodiments, BMP species levels are increased in bone marrow-derived macrophages that are derived in vitro from bone marrow cells of a subject having, or at risk of having, a progranulin-associated disorder as compared to a healthy control or a control not related to a progranulin-associated disorder.

[0097] In some embodiments, BMP species levels are decreased in liver, brain, cerebrospinal fluid, plasma, or urine of a subject having, or at risk of having, a progranulin-associated disorder as compared to a healthy control or a control not related to a progranulin-associated disorder.

[0098] In some embodiments, the abundance of a BMP species in the test sample of a subject having, or at risk of having, a progranulin-associated disorder has at least about a 1.2-fold, 1.5-fold, or 2-fold difference compared to a reference value of a control such as a healthy control or a control not related to a progranulin-associated disorder. In other embodiments, the abundance of a BMP species in the test sample of a subject having, or at risk of having, a progranulin-associated disorder has about a 1.2-fold to about 4-fold difference compared to a reference value of a control such as a healthy control or a control not related to a progranulin-associated disorder. In some embodiments, the difference compared to a reference value is about 2-fold to about 3-fold. In some embodiments, the subject has a disorder associated with a decreased level of progranulin and/or one or more signs or symptoms of a disorder associated with a decreased level of progranulin.

[0099] In some embodiments, the reference value is the BMP species value prior to treatment. In some embodiments, the subject is treated for a decreased level of progranulin or a progranulin-associated disorder, and the test sample comprises one or more pre-treatment test samples that are obtained from the subject before treatment has started and one or more post-treatment test samples that are obtained from the subject after treatment has started. In some embodiments, the method further comprises determining that the subject is responding to the treatment when the abundance of at least one of the one or more BMP species post-treatment shows an improvement over the one or more BMP species pre-treatment relative to a healthy control.

[0100] In some embodiments, the methods comprise (a) measuring an abundance of one or more bis(monoacylglycero)phosphate (BMP) species in a test sample obtained from a subject; (b) treating the test sample or subject with a compound, pharmaceutical composition, or dosing regimen thereof (e.g., treating the test sample or subject with a Fc dimer:PGRN fusion protein described herein); (c) measuring an abundance of one or more BMP species in a test sample obtained from the treated subject, and (d) comparing the abundance of the one or more BMP species measured in steps (a) and (c); and (e) determining whether the compound or a dosing regimen improves BMP levels for treating a progranulin-associated disorder.

[0101] In some embodiments, two or more post-treatment test samples are obtained at different time points after treatment has started, and the method further comprises determining that the subject is responding to treatment when the abundance of at least one of the one or more BMP species measured in a post-treatment sample is a) lower in bone marrow-derived macrophage (BMDM) or b) higher in liver, brain, cerebrospinal fluid, plasma, or urine than the abundance of the corresponding one or more BMP species measured in the pre-treatment sample. In some embodiments, the subject is determined to be responding to the treatment when the abundance of at least one of the one or more BMP species measured in a post-treatment sample is a) at least about 1.2-fold lower in BMDM or b) at least about 1.2-fold higher in liver, brain, cerebrospinal fluid, plasma, or urine than the abundance of the corresponding one or more BMP species measured in the pre-treatment sample.

[0102] In some embodiments, the improved BMP species level is an improvement over the BMP species level prior to treatment relative to the reference value of a control such as a healthy control or a control not related to a progranulin-associated disorder. In some embodiments, the improved BMP species level is closer in value to the control than the pre-treatment BMP species level is to the control. In some embodiments, the improved BMP species level has a difference compared to the control of less than 15%, 10%, or 5%. In some embodiments, the improved BMP species level has a difference compared to a healthy control of less than 10% or 5%. In some embodiments, the improved BMP species level has a difference compared to a healthy control of less than 5%.

[0103] In some embodiments, the method further comprises determining that the subject is responding to the treatment when the abundance of at least one of the one or more BMP species measured in at least one of the one or more post-treatment test samples is about the same as the corresponding reference value of a healthy control.

[0104] In some embodiments, the test or reference sample or one or more reference values comprises or relates to a cell, a tissue, whole blood, plasma, serum, cerebrospinal fluid, interstitial fluid, sputum, urine, feces, bronchioalveolar lavage fluid, lymph, semen, breast milk, amniotic fluid, or a combination thereof. In some embodiments, the cell is a peripheral blood mononuclear cell (PBMC), a bone marrow-derived macrophage (BMDM), a retinal pigmented epithelial (RPE) cell, a blood cell, an erythrocyte, a leukocyte, a neural cell, a microglial cell, a brain cell, a cerebral cortex cell, a spinal cord cell, a bone marrow cell, a liver cell, a kidney cell, a splenic cell, a lung cell, an eye cell, a chorionic villus cell, a muscle cell, a skin cell, a fibroblast, a heart cell, a lymph node cell, or a combination thereof. In some embodiments, the cell is a cultured cell. In some embodiments, the cultured cell is a BMDM or an RPE cell.

[0105] In some embodiments, the tissue comprises brain tissue, cerebral cortex tissue, spinal cord tissue, liver tissue, kidney tissue, muscle tissue, heart tissue, eye tissue, retinal tissue, a lymph node, bone marrow, skin tissue, blood vessel tissue, lung tissue, spleen tissue, valvular tissue, or a combination thereof. In some embodiments, the test and/or reference sample is purified from a cell and/or a tissue and comprises an endosome, a lysosome, an extracellular vesicle, an exosome, a microvesicle, or a combination thereof.

[0106] In some embodiments, the one or more BMP species comprise two or more BMP species. In some embodiments, the one or more BMP species comprise BMP(16:0_18:1), BMP(16:0_18:2), BMP(18:0_18:0), BMP(18:0_18:1), BMP(18:1_18:1), BMP(16:0_20:3), BMP(18:1_20:2), BMP(18:0_20:4), BMP(16:0_22:5), BMP(20:4_20:4), BMP(22:6_22:6), BMP(20:4_20:5), BMP(18:2_18:2), BMP(16:0_20:4), BMP(18:0_18:2), BMP(18:0e_22:6), BMP(18:1e_20:4), BMP(18:3_22:5), BMP(20:4_22:6), BMP(18:0e_20:4), BMP(18:2_20:4), BMP(18:1_22:6), BMP(18:1_20:4), BMP(18:0_22:6), or a combination thereof.

[0107] In some embodiments, the one or more BMP species comprise BMP(18:1_18:1), BMP(18:0_20:4), BMP(20:4_20:4), BMP(22:6_22:6), BMP(20:4_22:6), BMP(18:1_22:6), BMP(18:1_20:4), BMP(18:0_22:6), BMP(18:3_22:5), or a combination thereof.

[0108] In some embodiments, the test sample comprises a cultured cell and the one or more BMP species comprise BMP(18:1_18:1). In some embodiments, the test sample comprises plasma, tissue, urine, cerebrospinal fluid (CSF), and/or brain or liver tissue, and the one or more BMP species comprise BMP(22:6_22:6). In some embodiments, the test sample comprises liver tissue and the one or more BMP species comprise BMP(22:6_22:6), BMP(18:3_22:5), or a combination thereof. In some embodiments, the test sample comprises CSF or urine and the one or more BMP species comprise BMP(22:6_22:6). In some embodiments, the test sample comprises microglia and the one or more BMP species comprise BMP(18:3_22:5).

[0109] In some embodiments, the abundance of the one or more BMP species is measured using a method selected from the group consisting of liquid chromatography-mass spectrometry (LC-MS), liquid chromatography-tandem mass spectrometry (LC-MS/MS), gas chromatography-mass spectrometry (GC-MS), gas chromatography-tandem mass spectrometry (GC-MS/MS), enzyme-linked immunosorbent assay (ELISA), and a combination thereof. In some embodiments, an internal BMP standard is used to measure the abundance of the one or more BMP species in step (a) and/or determine the corresponding reference value. In some embodiments, the internal BMP standard comprises a BMP species that is not naturally present in the subject and/or the reference subject or population of reference subjects. In some embodiments, the internal BMP standard comprises BMP(14:0_14:0).

[0110] In some embodiments, the progranulin-associated disorder is a disorder related to progranulin expression, processing, glycosylation, cellular uptake, trafficking, and/or function. In some embodiments, the subject and/or the reference subject or population of reference subjects have a decreased level of progranulin and/or a disorder associated with a decreased level of progranulin, and the test sample has been contacted with a candidate compound (e.g., a Fc dimer:PGRN fusion protein described herein). In some embodiments, the subject and/or the reference subject or population of reference subjects have one or more signs or symptoms of the disorder associated with a decreased level of progranulin. In some embodiments, the subject and/or the reference subject or population of reference subjects have a mutation in a granulin (GRN) gene. In some embodiments, the mutation in the GRN gene decreases progranulin expression and/or activity. In some embodiments, the progranulin-associated disorder is atherosclerosis, Gaucher's disease, or age-related macular degeneration (AMD). In some embodiments, the progranulin-associated disorder is Gaucher's disease type 1. In some embodiments, the progranulin-associated disorder is a disorder associated with TDP-43. In other embodiments the TDP-43 associated disorder is AD or ALS.

[0111] In some embodiments, the subject and/or the reference subject is a human, a non-human primate, a rodent, a dog, or a pig.

[0112] In another aspect, the present disclosure provides a kit for monitoring progranulin levels in a subject. In some embodiments, the kit comprises a bis(monoacylglycero)phosphate (BMP) standard for measuring the abundance of one or more BMP species in a test sample obtained from the subject and/or a reference sample obtained from a reference subject or a population of reference subjects. In some embodiments, the BMP standard comprises a BMP species that is not naturally present in the subject and/or reference subject. In some embodiments, the BMP standard comprises BMP(14:0_14:0).

[0113] In some embodiments, the kit further comprises reagents for obtaining the sample from the subject and/or reference subject, processing the sample, measuring the abundance of the one or more BMP species, or a combination thereof. In some embodiments, the kit further comprises instructions for use.

[0114] In another aspect, the present disclosure provides a non-human transgenic animal comprising (a) a nucleic acid that encodes a chimeric TfR polypeptide comprising: (i) an apical domain having at least 90% identity to SEQ ID NO:296 and (ii) the transferrin binding site of the native TfR polypeptide of the animal, and (b) a knockout of the GRN gene, and wherein the chimeric TfR polypeptide is expressed in the brain of the animal.

[0115] In some embodiments, the apical domain comprises the amino acid sequence of SEQ ID NO:296. In some embodiments, the apical domain comprises the amino acid sequence of SEQ ID NO:297, SEQ ID NO:298, or SEQ ID NO:299.

[0116] In some embodiments, the chimeric TfR polypeptide comprises an amino acid sequence having at least 95% identity to SEQ ID NO:300.

[0117] In some embodiments, the animal expresses a level of the chimeric TfR polypeptide in brain, liver, kidney, or lung tissue within 20% (e.g., 18%, 16%, 14%, 12%, 10%, 8%, 6%, or 4%) of the level of expression of TfR in the same tissue of a corresponding wild-type animal of the same species.

[0118] In some embodiments, the animal comprises a red blood cell count, level of hemoglobin, or level of hematocrit within 20% (e.g., 18%, 16%, 14%, 12%, 10%, 8%, 6%, or 4%) of the red blood cell count, level of hemoglobin, or level of hematocrit in a corresponding wild-type animal of the same species.

[0119] In some embodiments, the nucleic acid sequence encoding the apical domain comprises a nucleic acid sequence having at least 95% (e.g., 97%, 98%, or 99%) identity to SEQ ID NO:301.

[0120] In some embodiments, the animal is homozygous or heterozygous for the nucleic acid encoding the chimeric TfR polypeptide.

[0121] In some embodiments, the knockout of the GRN gene comprises a deletion of exons 1-4 of the GRN gene.

[0122] In some embodiments, the animal is a mouse or a rat.

[0123] In another aspect, the present disclosure provides a protein comprising: (a) a modified Fc polypeptide dimer that specifically binds TfR; and (b) a progranulin polypeptide. In some embodiment, the protein further comprises: (c) a polypeptide linker, wherein the polypeptide linker links the modified Fc polypeptide dimer to the progranulin polypeptide.

[0124] In some embodiments, the modified Fc polypeptide dimer specifically binds to the apical domain of TfR.

[0125] In some embodiments, the modified Fc polypeptide dimer comprises at least two substitutions at positions selected from the group consisting of 384, 386, 387, 388, 389, 390, 413, 416, and 421, according to EU numbering, of one Fc polypeptide. In some embodiments, the modified Fc polypeptide dimer comprises substitutions at at least three, four, five, six, seven, eight, or nine of the positions of one Fc polypeptide. In some embodiments, the modified Fc polypeptide dimer further comprises one, two, three, or four substitutions at positions comprising 380, 391, 392, and 415, according to EU numbering, of one Fc polypeptide. In some embodiments, the modified Fc polypeptide dimer further comprises one, two, or three substitutions at positions comprising 414, 424, and 426, according to EU numbering, of one Fc polypeptide.

[0126] In certain embodiments, the modified Fc polypeptide dimer comprises Trp at position 388 of one Fc polypeptide. In certain embodiments, the modified Fc polypeptide dimer comprises at least one position selected from the following: position 380 is Tip, Leu, or Glu; position 384 is Tyr or Phe; position 386 is Thr; position 387 is Glu; position 388 is Trp; position 389 is Ser, Ala, Val, or Asn; position 390 is Ser or Asn; position 413 is Thr or Ser; position 415 is Glu or Ser; position 416 is Glu; and position 421 is Phe of one Fc polypeptide.

[0127] In some embodiments, the modified Fc polypeptide dimer comprises 2, 3, 4, 5, 6, 7, 8, 9, 10, or 11 positions selected from the following: position 380 is Trp, Leu, or Glu; position 384 is Tyr or Phe; position 386 is Thr; position 387 is Glu; position 388 is Trp; position 389 is Ser, Ala, Val, or Asn; position 390 is Ser or Asn; position 413 is Thr or Ser; position 415 is Glu or Ser; position 416 is Glu; and position 421 is Phe of one Fc polypeptide.

[0128] In some embodiments, the modified Fc polypeptide dimer comprises a first Fc polypeptide CH3 domain with at least 85% identity, at least 90% identity, or at least 95% identity to amino acids 111-217 of any one of SEQ ID NOS:34-38, 58, 60-90, 136, and 137-210. In certain embodiments, the modified Fc polypeptide dimer comprises the amino acid sequence of any one of SEQ ID NOS:136-210. In certain embodiments, the modified Fc polypeptide dimer comprises the amino acid sequence of any one of SEQ ID NOS:136, 138, 150, 162, 174, 186, and 198.

[0129] In some embodiments, the modified Fc polypeptide dimer comprises an Fc polypeptide having an amino acid sequence identity of at least 75%, or at least 80%, 85%, 90%, 92%, or 95%, as compared to the corresponding wild-type Fc polypeptide.

[0130] In some embodiments, the modified Fc polypeptide dimer does not include an immunoglobulin heavy and/or light chain variable region sequence or an antigen-binding portion thereof.

[0131] In some embodiments, the C-terminus of an Fc polypeptide in the modified Fc polypeptide dimer is linked to the N-terminus of the progranulin polypeptide. In some embodiments, the the polypeptide linker links the C-terminus of the Fc polypeptide in the modified Fc polypeptide dimer to the N-terminus of the progranulin polypeptide.

[0132] In some embodiments, the C-terminus of the progranulin polypeptide is linked to the N-terminus of an Fc polypeptide in the modified Fc polypeptide dimer. In some embodiments, the polypeptide linker links the C-terminus of the progranulin polypeptide to the N-terminus of the Fc polypeptide in the modified Fc polypeptide dimer.

[0133] In some embodiments, any of the proteins described herein can be used in therapy.

[0134] In some embodiments, any of the proteins described herein can be used in treating a neurodegenerative disease.

[0135] In some embodiments, any of the proteins described herein can be used in treating a neurodegenerative disease selected from the group consisting of Alzheimer's disease, primary age-related tauopathy, lewy body dementia, progressive supranuclear palsy (PSP), frontotemporal dementia, frontotemporal dementia with parkinsonism linked to chromosome 17, argyrophilic grain dementia, amyotrophic lateral sclerosis, amyotrophic lateral sclerosis/parkinsonism-dementia complex of Guam (ALS-PDC), corticobasal degeneration, chronic traumatic encephalopathy, Creutzfeldt-Jakob disease, dementia pugilistica, diffuse neurofibrillary tangles with calcification, Down's syndrome, familial British dementia, familial Danish dementia, Gerstmann-Straussler-Scheinker disease, globular glial tauopathy, Guadeloupean parkinsonism with dementia, Guadelopean PSP, Hallevorden-Spatz disease, hereditary diffuse leukoencephalopathy with spheroids (HDLS), inclusion-body myositis, multiple system atrophy, myotonic dystrophy, Nasu-Hakola disease, neurofibrillary tangle-predominant dementia, Niemann-Pick disease type C, pallido-ponto-nigral degeneration, Parkinson's disease, Pick's disease, postencephalitic parkinsonism, prion protein cerebral amyloid angiopathy, progressive subcortical gliosis, subacute sclerosing panencephalitis, and tangle only dementia.

[0136] In another aspect, the present disclosure provides a protein for use in treating a neurodegenerative disease, comprising (a) a first Fc polypeptide that is linked to a progranulin polypeptide through a polypeptide linker; and (b) a second Fc polypeptide that forms an Fc dimer with the first Fc polypeptide, wherein (a) comprises the sequence of SEQ ID NO:213 and (b) comprises the sequence of SEQ ID NO:273.

[0137] In another aspect, the present disclosure provides a protein for use in treating a neurodegenerative disease, comprising (a) a first Fc polypeptide that is linked to a progranulin polypeptide through a polypeptide linker; and (b) a second Fc polypeptide that forms an Fc dimer with the first Fc polypeptide, wherein (a) comprises the sequence of SEQ ID NO:214 and (b) comprises the sequence of SEQ ID NO:273.

[0138] In another aspect, the present disclosure provides a protein for use in treating a neurodegenerative disease, comprising (a) a first Fc polypeptide that is linked to a progranulin polypeptide through a polypeptide linker; and (b) a second Fc polypeptide that forms an Fc dimer with the first Fc polypeptide, wherein (a) comprises the sequence of SEQ ID NO:225 and (b) comprises the sequence of SEQ ID NO:273.

[0139] In another aspect, the present disclosure provides a protein for use in treating a neurodegenerative disease, comprising (a) a first Fc polypeptide that is linked to a progranulin polypeptide through a polypeptide linker; and (b) a second Fc polypeptide that is linked to a progranulin polypeptide through a polypeptide linker, wherein the second Fc polypeptide forms an Fc dimer with the first Fc polypeptide, and wherein (a) comprises the sequence of SEQ ID NO:213 and (b) comprises the sequence of SEQ ID NO:274.

[0140] In another aspect, the present disclosure provides a protein for use in treating a neurodegenerative disease, comprising (a) a first Fc polypeptide that is linked to a progranulin polypeptide through a polypeptide linker; and (b) a second Fc polypeptide that is linked to a progranulin polypeptide through a polypeptide linker, wherein the second Fc polypeptide forms an Fc dimer with the first Fc polypeptide, and wherein (a) comprises the sequence of SEQ ID NO:213 and (b) comprises the sequence of SEQ ID NO:275.

[0141] In another aspect, the present disclosure provides a protein for use in treating a neurodegenerative disease, comprising (a) a first Fc polypeptide that is linked to a progranulin polypeptide through a polypeptide linker; and (b) a second Fc polypeptide that is linked to a progranulin polypeptide through a polypeptide linker, wherein the second Fc polypeptide forms an Fc dimer with the first Fc polypeptide, and wherein (a) comprises the sequence of SEQ ID NO:225 and (b) comprises the sequence of SEQ ID NO:275.

[0142] In another aspect, the present disclosure provides a protein for use in treating a neurodegenerative disease, comprising (a) a first Fc polypeptide that is linked to a progranulin polypeptide through a polypeptide linker; and (b) a second Fc polypeptide that forms an Fc dimer with the first Fc polypeptide, wherein (a) comprises the sequence of SEQ ID NO:213 and (b) comprises the sequence of SEQ ID NO:261.

[0143] In another aspect, the present disclosure provides a protein for use in treating a neurodegenerative disease, comprising (a) a first Fc polypeptide that is linked to a progranulin polypeptide through a polypeptide linker; and (b) a second Fc polypeptide that forms an Fc dimer with the first Fc polypeptide, wherein (a) comprises the sequence of SEQ ID NO:225 and (b) comprises the sequence of SEQ ID NO:261.

[0144] In another aspect, the present disclosure provides a protein for use in treating a neurodegenerative disease, comprising (a) a first Fc polypeptide that is linked to a progranulin polypeptide through a polypeptide linker; and (b) a second Fc polypeptide that forms an Fc dimer with the first Fc polypeptide, wherein (a) comprises the sequence of SEQ ID NO:215 and (b) comprises the sequence of SEQ ID NO:110.

[0145] In another aspect, the present disclosure provides a protein for use in treating a neurodegenerative disease, comprising (a) a first Fc polypeptide that is linked to a progranulin polypeptide through a polypeptide linker; and (b) a second Fc polypeptide that forms an Fc dimer with the first Fc polypeptide, wherein (a) comprises the sequence of SEQ ID NO:227 and (b) comprises the sequence of SEQ ID NO:110.

[0146] In another aspect, the present disclosure provides a protein for use in treating a neurodegenerative disease, comprising (a) a first Fc polypeptide that is linked to a progranulin polypeptide through a polypeptide linker; and (b) a second Fc polypeptide that forms an Fc dimer with the first Fc polypeptide, wherein (a) comprises the sequence of SEQ ID NO:215 and (b) comprises the sequence of SEQ ID NO:273.

[0147] In another aspect, the present disclosure provides a protein for use in treating a neurodegenerative disease, comprising (a) a first Fc polypeptide that is linked to a progranulin polypeptide through a polypeptide linker; and (b) a second Fc polypeptide that forms an Fc dimer with the first Fc polypeptide, wherein (a) comprises the sequence of SEQ ID NO:227 and (b) comprises the sequence of SEQ ID NO:273.

[0148] In another aspect, the present disclosure provides a protein for use in treating a neurodegenerative disease, comprising (a) a first Fc polypeptide that is linked to a progranulin polypeptide through a polypeptide linker; and (b) a second Fc polypeptide that forms an Fc dimer with the first Fc polypeptide, wherein (a) comprises the sequence of SEQ ID NO:215 and (b) comprises the sequence of SEQ ID NO:282.

[0149] In another aspect, the present disclosure provides a protein for use in treating a neurodegenerative disease, comprising (a) a first Fc polypeptide that is linked to a progranulin polypeptide through a polypeptide linker; and (b) a second Fc polypeptide that forms an Fc dimer with the first Fc polypeptide, wherein (a) comprises the sequence of SEQ ID NO:227 and (b) comprises the sequence of SEQ ID NO:282.

[0150] In another aspect, the present disclosure provides a protein for use in treating a neurodegenerative disease, comprising (a) a first Fc polypeptide that is linked to a progranulin polypeptide through a polypeptide linker; and (b) a second Fc polypeptide that forms an Fc dimer with the first Fc polypeptide, wherein (a) comprises the sequence of SEQ ID NO:215 and (b) comprises the sequence of SEQ ID NO:284.

[0151] In another aspect, the present disclosure provides a protein for use in treating a neurodegenerative disease, comprising (a) a first Fc polypeptide that is linked to a progranulin polypeptide through a polypeptide linker; and (b) a second Fc polypeptide that forms an Fc dimer with the first Fc polypeptide, wherein (a) comprises the sequence of SEQ ID NO:227 and (b) comprises the sequence of SEQ ID NO:284.

[0152] In another aspect, the present disclosure provides a protein for use in treating a neurodegenerative disease, comprising (a) a first Fc polypeptide that is linked to a progranulin polypeptide through a polypeptide linker; and (b) a second Fc polypeptide that forms an Fc dimer with the first Fc polypeptide, wherein (a) comprises the sequence of SEQ ID NO:215 and (b) comprises the sequence of SEQ ID NO:285.

[0153] In another aspect, the present disclosure provides a protein for use in treating a neurodegenerative disease, comprising (a) a first Fc polypeptide that is linked to a progranulin polypeptide through a polypeptide linker; and (b) a second Fc polypeptide that forms an Fc dimer with the first Fc polypeptide, wherein (a) comprises the sequence of SEQ ID NO:227 and (b) comprises the sequence of SEQ ID NO:285.

[0154] In another aspect, the present disclosure provides a protein for use in treating a neurodegenerative disease, comprising (a) a first Fc polypeptide that is linked to a progranulin polypeptide through a polypeptide linker; and (b) a second Fc polypeptide that forms an Fc dimer with the first Fc polypeptide, wherein (a) comprises the sequence of SEQ ID NO:215 and (b) comprises the sequence of SEQ ID NO:210.

[0155] In another aspect, the present disclosure provides a protein for use in treating a neurodegenerative disease, comprising (a) a first Fc polypeptide that is linked to a progranulin polypeptide through a polypeptide linker; and (b) a second Fc polypeptide that forms an Fc dimer with the first Fc polypeptide, wherein (a) comprises the sequence of SEQ ID NO:227 and (b) comprises the sequence of SEQ ID NO:210.

[0156] In another aspect, the present disclosure provides a protein for use in treating a neurodegenerative disease, comprising (a) a first Fc polypeptide that is linked to a progranulin polypeptide through a polypeptide linker; and (b) a second Fc polypeptide that forms an Fc dimer with the first Fc polypeptide, wherein (a) comprises the sequence of SEQ ID NO:215 and (b) comprises the sequence of SEQ ID NO:291.

[0157] In another aspect, the present disclosure provides a protein for use in treating a neurodegenerative disease, comprising (a) a first Fc polypeptide that is linked to a progranulin polypeptide through a polypeptide linker; and (b) a second Fc polypeptide that forms an Fc dimer with the first Fc polypeptide, wherein (a) comprises the sequence of SEQ ID NO:227 and (b) comprises the sequence of SEQ ID NO:291.

### BRIEF DESCRIPTION OF THE DRAWINGS

[0158] FIG. 1A shows a schematic drawing of three Fc dimer:PGRN fusion proteins Fusion 1, Fusion 2, and Fusion 3. In Fusion 1 and Fusion 2, the N-terminus of PGRN is fused to the C-terminus of the Fc polypeptide that does not contain TfR-binding mutations (indicated by star) by way of a (G₄S)₂ linker (SEQ ID NO:276) and a G₄S linker (SEQ ID NO:277), respectively. In Fusion 3, the C-terminus of PGRN is fused to the N-terminus of the Fc polypeptide that does not contain TfR-binding mutations (indicated by star) by way of a (G₄S)₂ linker.

[0159] FIG. 1B shows SDS-PAGE gels demonstrating that fusion proteins Fusion 1, Fusion 2, and Fusion 3 each containing one PGRN molecule were purified to greater than 85% purity.

[0160] FIG. 1C is a schematic drawing showing the Fc dimer:PGRN fusion proteins Fusion 4, Fusion 5, and Fusion 6. In Fusion 4, each of the two PGRN molecules is fused to the C-terminus of an Fc polypeptide by way of the linker (G₄S)₂ (SEQ ID NO:276). One PGRN molecule is fused to C-terminus of the Fc polypeptide containing TfR-binding mutations (indicated by star), while the other PGRN molecule is fused to C-terminus of the Fc polypeptide without the TfR-binding mutations. In Fusion 5, one PGRN molecule is fused to the N-terminus of the Fc polypeptide containing TfR-binding mutations (indicated by star) by way of the linker (G₄S)₂, while the other PGRN molecule is fused to the C-terminus of the other Fc polypeptide without the TfR-binding mutations. In Fusion 6, each of the two PGRN molecules is fused to the N-terminus of an Fc polypeptide by way of the linker (G₄S)₂. One PGRN molecule is fused to N-terminus of the Fc polypeptide containing TfR-binding mutations (indicated by star), while the other PGRN molecule is fused to N-terminus of the Fc polypeptide without the TfR-binding mutations.

[0161] FIG. 1D shows that Fc dimer:PGRN fusion proteins Fusion 4 and Fusion 5 each containing two PGRN molecules were purified to greater than 85% purity.

[0162] FIG. 1E is a schematic drawing showing the Fc dimer:PGRN fusion proteins Fusion 7 and Fusion 8. Both fusion proteins Fusion 7 and Fusion 8 contain Fc polypeptides that do not contain TfR-binding mutations. In Fusion 7, the N-terminus of PGRN is fused to the C-terminus of an Fc polypeptide by way of the linker (G₄S)₂ (SEQ ID NO:276). In Fusion 8, the C-terminus of PGRN is fused to the N-terminus of an Fc polypeptide by way of the linker (G₄S)₂.

[0163] FIGS. 2A and 2B show efficient cellular uptake of recombinant PGRN and Fc dimer:PGRN fusion proteins (Fusion 1, Fusion 2, and Fusion 3) as indicated by both PGRN (FIG. 2A) and Fc stainings (FIG. 2B).

[0164] FIG. 3 shows Fc dimer:PGRN fusion proteins (Fusion 1, Fusion 2, and Fusion 3) were able to rescue of the proteolytic deficits in GRN KO BMDMs.

[0165] FIG. 4 shows the dose-response of Fc dimer:PGRN fusion proteins (Fusion 1, Fusion 3, Fusion 4, and Fusion 5) in an endo-lysosomal proteolysis assay using a Bodipy-BSA conjugate (DQ-BSA).

[0166] FIG. 5 shows Fc dimer:PGRN fusion proteins (Fusion 1, Fusion 2, and Fusion 3) were able to rescue elevated cathepsin D activity observed in the GRN KO BMDMs.

[0167] FIGS. 6A-6D show Fc dimer:PGRN fusion protein Fusion 1 was able to rescue elevated mRNA levels of the lysosomal genes Cts1, Tmem106b, and Psap in the GRN KO BMDMs.

[0168] FIGS. 7A and 7B show that Fc dimer:PGRN fusion proteins Fusion 1 and Fusion 3 displayed similar pharmacokinetic profiles in plasma and liver samples of WT mice dosed with these fusion proteins.

[0169] FIGS. 8A and 8B show scatter plots with mean and SEM indicated for concentrations of Fc dimer:PGRN fusion proteins Fusion 1 and Fusion 3 in nM that were measured in brain lysates and liver lysates, respectively, of WT and hTfR mice at 4 hours post-dosing. Data were generated using a biotinylated goat polyclonal human progranulin detection antibody (R&D Systems #BAF2420).

[0170] FIG. 9A shows a scatter plot with mean and SEM indicated for brain:plasma ratios of Fc dimer:PGRN fusion proteins Fusion 1 and Fusion 3 normalized to Fusion 3 in WT.

[0171] FIG. 9B shows a scatter plot with mean and SEM indicated for brain:liver ratios of Fc dimer:PGRN fusion proteins Fusion 1 and Fusion 3 normalized to Fusion 3 in WT.

[0172] FIGS. 10A and 10B show a scatter plot with mean and SEM indicated for concentrations of Fc dimer:PGRN fusion proteins Fusion 1 and Fusion 3 in nM that were measured in brain lysates and liver lysates, respectively, of WT and hTfR mice at 4 hours post-dosing. Data were generated using a detection antibody targeting a site in Fc.

[0173] FIGS. 11A and 111B show a scatter plot with mean and SEM indicated for concentrations of Fc dimer:PGRN fusion proteins Fusion 1 and Fusion 3 in ng/mg total protein that were measured in brain lysates and liver lysates, respectively, of WT and hTfR mice at 4 hours post-dosing. Data were generated using a detection antibody targeting a site in Fc.

[0174] FIGS. 12A and 12B show semi-log plots of the time course of mean plasma concentrations in nM of Fc dimer:PGRN fusion proteins Fusion 1 and Fusion 3, respectively, in hTfR and WT mice.

[0175] FIGS. 12C and 12D show scatter plots with mean and SEM indicated for plasma concentrations in nM of Fc dimer:PGRN fusion proteins Fusion 1 and Fusion 3 at 0.25 hr and 4 hr post-dosing, respectively.

[0176] FIGS. 13A and 13B show increased levels of bis(monoacylglycero)phosphate (BMP) species in bone marrow-derived macrophages (BMDMs) of GRN knockout mice compared to wild-type. FIG. 13A shows that treating GRN knockout mouse BMDMs with Fc dimer:PGRN fusion proteins Fusion 11 and Fusion 12 shown in Table 1 of Example 1 reduced elevated BMP(18:1_18:1) levels. FIG. 13B shows that treating GRN knockout mouse BMDMs with Fc dimer:PGRN fusion proteins Fusion 11 and Fusion 12 reduced elevated BMP (20:4_20:4) levels.

[0177] FIGS. 13C and 13D show that treating GRN knockout mouse BMDMs with recombinant progranulin (Adipogen) or progranulin expressed by lentivirus reduced elevated BMP levels (total BMP as well as 18:1_18:1).

[0178] FIG. 14A shows decreased BMP 44:12 in the periphery liver, plasma, and urine of GRN knockout mice compared to wild-type.

[0179] FIG. 14B shows decreased BMP 44:12 in cerebrospinal fluid (CSF) and brain of the central nervous system (CNS) compared to wild-type.

[0180] FIG. 15 shows that GRN knockout mice ranging from 2 to 19 months exhibited age-independent reduction in plasma BMP 44:12 compared to wild-type.

[0181] FIGS. 16A and 16B show that treatment of GRN knockout mice with Fc dimer:PGRN fusion proteins Fusion 11 and Fusion 12 increased liver BMP 44:12 and 20:4_20:4 levels.

[0182] FIG. 17 shows that treatment of GRN knockout mice with Fc dimer:PGRN fusion proteins Fusion 11 and Fusion 12 increased plasma BMP 44:12 levels.

[0183] FIG. 18 shows that treatment of GRN knockout mice with Fc dimer:PGRN fusion proteins Fusion 11 and Fusion 12 increased urine BMP 44:12 levels (normalized to creatine).

[0184] FIG. 19 shows that treatment of GRN knockout mice with Fc dimer:PGRN fusion proteins Fusion 11 and Fusion 12 increased CSF BMP 44:12 levels.

[0185] FIGS. 20A and 20B show that treatment of GRN knockout mice with Fc dimer:PGRN fusion proteins Fusion 11 and Fusion 12 increased brain BMP 44:12 and 20:4_20:4 levels, respectively.

[0186] FIGS. 21A-21C show that Fusion 11 and Fusion 12 were able to cross the BBB in the brain of GRN KO/hTfR.KI mice.

### DETAILED DESCRIPTION

### I. Introduction

[0187] We have developed fusion proteins that include a progranulin polypeptide or a variant thereof linked to an Fc polypeptide. These proteins can be used to treat progranulin-associated disorders (e.g., a neurodegenerative disease, such as frontotemporal dementia (FTD)). In some cases, the protein includes a dimeric Fc polypeptide, where one of the Fc polypeptide monomers is linked to the progranulin polypeptide. The Fc polypeptides can increase progranulin levels and, in some cases, can be modified to confer additional functional properties onto the protein.

[0188] Progranulin (PGRN) (also known as proepithelin and acrogranin) is a cysteine-rich protein encoded by the gene GRN, which maps to human chromosome 17q21. Progranulin is a lysosomal protein as well as a secreted protein consisting of seven and a half tandem repeats of conserved granulin peptides, each of which is about 60 amino acid long and can be released through cleavage by various extracellular proteases (e.g., elastase) and lysosomal proteases (e.g., cathepsin L)(Kao et al., Nat Rev Neurosci. 18(6):325-333, 2017). Generally, progranulin is believed to play both cell-autonomous and non-cell autonomous roles in the control of innate immunity as well as the function of lysosomes, where it regulates the activity and levels of various cathepsins and other hydrolases (Kao et al., supra). Progranulin also has a neurotrophic function and promotes neurite outgrowth and neuronal survival (Kao et al., supra).

[0189] Also described herein are fusion proteins that facilitate delivery of a progranulin polypeptide across the blood-brain barrier (BBB). These proteins comprise an Fc polypeptide and a modified Fc polypeptide that form a dimer, and a progranulin polypeptide linked to the Fc region and/or the modified Fc region. The modified Fc region can specifically bind to a BBB receptor such as a transferrin receptor (TfR).

### II. Definitions

[0190] As used herein, the singular forms “a,” “an,” and “the” include plural referents unless the content clearly dictates otherwise. Thus, for example, reference to “a polypeptide” may include two or more such molecules, and the like.

[0191] As used herein, the terms “about” and “approximately,” when used to modify an amount specified in a numeric value or range, indicate that the numeric value as well as reasonable deviations from the value known to the skilled person in the art, for example 20%, f 10%, or ±5%, are within the intended meaning of the recited value.

[0192] As used herein, the term “BMP” refers to bis(monoacylglycero)phosphate. BMP is a glycerophospholipid that is negatively charged (e.g. at the pH normally present within late endosomes and lysosomes) having the structure depicted in Formula I:

[chemical structure]

[0193] BMP molecules comprise two fatty acid side chains. R and R′ in Formula I represent independently selected saturated or unsaturated aliphatic chains, each of which typically contains 14, 16, 18, 20, or 22 carbon atoms. When a fatty acid side chain is unsaturated, it can contain 1, 2, 3, 4, 5, 6, or more carbon-carbon double bonds. Furthermore, a BMP molecule can contain one or two alkyl ether substituents, wherein the carbonyl oxygen of one or both fatty acid side chains is replaced with two hydrogen atoms. Nomenclature that is used herein to describe a particular BMP species refers to a species having two fatty acid side-chains, wherein the structures of the fatty acid side chains are indicated within parentheses in the BMP format (e.g., BMP(18:1_18:1)). The numerals follow the standard fatty acid notation format of number of “fatty acid carbon atoms:number of double bonds.” An “e-” prefix is used to indicate the presence of an alkyl ether substituent wherein the carbonyl oxygen of the fatty acid side chain is replaced with two hydrogen atoms. For example, the “e” in “BMP(16:0e_18:0)” denotes that the side chain having 16 carbon atoms is an alkyl ether substituent.

[0194] A “progranulin polypeptide” or “PGRN polypeptide” refers to a cysteine-rich, lysosomal protein encoded by the gene GRN. A progranulin polypeptide may comprise a human progranulin sequence, e.g., the sequence of SEQ ID NO:211 or 212. A progranulin polypeptide may be a pre-mature progranulin having the sequence of SEQ ID NO:211, in which the first 17 amino acids indicate the signal peptide. A progranulin polypeptide may be a mature progranulin in which the 17-amino acid signal peptide is cleaved. A mature progranulin may comprise the sequence of SEQ ID NO:212. A progranulin polypeptide may include a sequence from a non-human species, e.g., mouse (accession no. NP_032201.2), rat (NP_058809.2 or NP_001139314.1), and chimpanzee (XP_016787144.1 or XP_016787145.1) in either pre-mature or mature form.

[0195] A “progranulin polypeptide variant” or “PGRN polypeptide variant” refers to a functional variant of a wild-type progranulin that has at least 90% sequence identity (e.g., 92%, 94%, 96%, 98%, or 99% sequence identity) to a mature wild-type progranulin polypeptide (e.g., SEQ ID NO:212). A progranulin polypeptide variant may have similar functions as those of a wild-type progranulin, e.g., where the progranulin polypeptide variant also binds sortilin or prosaposin, regulates the activity and levels of various lysosomal proteins (e.g., cathepsins), promotes neurite outgrowth and neuronal survival, and/or any other function described herein. The progranulin polypeptide variant comprises granulins G, F, B, A, C, D, and E of a full-length progranulin (e.g., SEQ ID NO:212).

[0196] The term “progranulin-associated disorder” refers to any pathological condition relating to progranulin including expression, processing, glycosylation, cellular uptake, trafficking, and/or function. The term “disorder associated with a decreased level of progranulin” refers to any pathological condition that directly or indirectly results from a level of progranulin that is insufficient to enable (i.e., is too low to enable) normal physiological function within a cell, a tissue, and/or a subject, as well as a precursors to such a condition. In some embodiments, the progranulin-associated disorder is a neurodegenerative disease (e.g., frontotemporal dementia (FTD)) or a lysosomal storage disorder.

[0197] The term “progranulin level” refers to the amount, concentration, and/or activity level of progranulin that is present, either in a subject or in a sample (e.g., a sample obtained from a subject). A progranulin level can refer to an absolute amount, concentration, and/or activity level of progranulin that is present, or can refer to a relative amount, concentration, and/or activity level. The term also refers to the amount or concentration of a progranulin polypeptide and/or progranulin mRNA (e.g., expressed from a GRN gene) that is present.

[0198] The term “bone marrow-derived macrophage” or “BMDM” refers to a macrophage cell that is generated or derived in vitro from a mammalian bone marrow (e.g., a bone marrow obtained from a subject). As a non-limiting example, BMDMs can be generated by culturing undifferentiated bone marrow cells in the presence of a cytokine such as macrophage colony-stimulating factor (M-CSF).

[0199] A “transferrin receptor” or “TfR” as used in the context of this disclosure refers to transferrin receptor protein 1. The human transferrin receptor 1 polypeptide sequence is set forth in SEQ ID NO:92. Transferin receptor protein 1 sequences from other species are also known (e.g., chimpanzee, accession number XP_003310238.1; rhesus monkey, NP_001244232.1; dog, NP_001003111.1; cattle, NP_001193506.1; mouse, NP_035768.1; rat, NP_073203.1; and chicken, NP_990587.1). The term “transferrin receptor” also encompasses allelic variants of exemplary reference sequences, e.g., human sequences, that are encoded by a gene at a transferrin receptor protein 1 chromosomal locus. Full-length transferrin receptor protein includes a short N-terminal intracellular region, a transmembrane region, and a large extracellular domain. The extracellular domain is characterized by three domains: a protease-like domain, a helical domain, and an apical domain.

[0200] As used herein, the term “Fc polypeptide” refers to the C-terminal region of a naturally occurring immunoglobulin heavy chain polypeptide that is characterized by an Ig fold as a structural domain. An Fc polypeptide contains constant region sequences including at least the CH2 domain and/or the CH3 domain and may contain at least part of the hinge region. In general, an Fc polypeptide does not contain a variable region.

[0201] A “modified Fc polypeptide” refers to an Fc polypeptide that has at least one mutation, e.g., a substitution, deletion, or insertion, as compared to a wild-type immunoglobulin heavy chain Fc polypeptide sequence, but retains the overall Ig fold or structure of the native Fc polypeptide.

[0202] As used herein, the term “Fc polypeptide dimer” refers to a dimer of two Fc polypeptides. In some embodiments, the two Fc polypeptides dimerize by the interaction between the two CH3 domains. If hinge regions or parts of the hinge regions are present in the two Fc polypeptides, one or more disulfide bonds can also form between the hinge regions of the two dimerizing Fc polypeptides.

[0203] A “modified Fc polypeptide dimer” refers to a dimer of two Fc polypeptides in which at least one Fc polypeptide is a modified Fc polypeptide that has at least one mutation, e.g., a substitution, deletion, or insertion, as compared to a wild-type immunoglobulin heavy chain Fc polypeptide sequence. For example, a modified Fc polypeptide dimer specifically binds TfR and has at least one modified Fc polypeptide having at least one mutation, e.g., a substitution, deletion, or insertion, as compared to a wild-type immunoglobulin heavy chain Fc polypeptide sequence.

[0204] The term “FcRn” refers to the neonatal Fc receptor. Binding of Fc polypeptides to FcRn reduces clearance and increases serum half-life of the Fc polypeptide. The human FcRn protein is a heterodimer that is composed of a protein of about 50 kDa in size that is similar to a major histocompatibility (MHC) class I protein and a β2-microglobulin of about 15 kDa in size.

[0205] As used herein, an “FcRn binding site” refers to the region of an Fc polypeptide that binds to FcRn. In human IgG, the FcRn binding site, as numbered using the EU index, includes T250, L251, M252, I253, S254, R255, T256, T307, E380, M428, H433, N434, H435, and Y436. These positions correspond to positions 20 to 26, 77, 150, 198, and 203 to 206 of SEQ ID NO:1.

[0206] As used herein, a “native FcRn binding site” refers to a region of an Fc polypeptide that binds to FcRn and that has the same amino acid sequence as the region of a naturally occurring Fc polypeptide that binds to FcRn.

[0207] The terms “CH3 domain” and “CH2 domain” as used herein refer to immunoglobulin constant region domain polypeptides. For purposes of this application, a CH3 domain polypeptide refers to the segment of amino acids from about position 341 to about position 447 as numbered according to the EU numbering scheme, and a CH2 domain polypeptide refers to the segment of amino acids from about position 231 to about position 340 as numbered according to the EU numbering scheme and does not include hinge region sequences. CH2 and CH3 domain polypeptides may also be numbered by the IMGT (ImMunoGeneTics) numbering scheme in which the CH2 domain numbering is 1-110 and the CH3 domain numbering is 1-107, according to the IMGT Scientific chart numbering (IMGT website). CH2 and CH3 domains are part of the Fc region of an immunoglobulin. An Fc region refers to the segment of amino acids from about position 231 to about position 447 as numbered according to the EU numbering scheme, but as used herein, can include at least a part of a hinge region of an antibody. An illustrative hinge region sequence is the human IgG1 hinge sequence EPKSCDKTHTCPPCP (SEQ ID NO:91).

[0208] The terms “wild-type,” “native,” and “naturally occurring” with respect to a CH3 or CH2 domain are used herein to refer to a domain that has a sequence that occurs in nature.

[0209] In the context of this disclosure, the term “mutant” with respect to a mutant polypeptide or mutant polynucleotide is used interchangeably with “variant.” A variant with respect to a given wild-type CH3 or CH2 domain reference sequence can include naturally occurring allelic variants. A “non-naturally” occurring CH3 or CH2 domain refers to a variant or mutant domain that is not present in a cell in nature and that is produced by genetic modification, e.g., using genetic engineering technology or mutagenesis techniques, of a native CH3 domain or CH2 domain polynucleotide or polypeptide. A “variant” includes any domain comprising at least one amino acid mutation with respect to wild-type. Mutations may include substitutions, insertions, and deletions.

[0210] The term “amino acid” refers to naturally occurring and synthetic amino acids, as well as amino acid analogs and amino acid mimetics that function in a manner similar to the naturally occurring amino acids.

[0211] Naturally occurring amino acids are those encoded by the genetic code, as well as those amino acids that are later modified, e.g., hydroxyproline, γ-carboxyglutamate and 0-phosphoserine. “Amino acid analogs” refers to compounds that have the same basic chemical structure as a naturally occurring amino acid, i.e., an a carbon that is bound to a hydrogen, a carboxyl group, an amino group, and an R group, e.g., homoserine, norleucine, methionine sulfoxide, methionine methyl sulfonium. Such analogs have modified R groups (e.g., norleucine) or modified peptide backbones, but retain the same basic chemical structure as a naturally occurring amino acid. “Amino acid mimetics” refers to chemical compounds that have a structure that is different from the general chemical structure of an amino acid, but that function in a manner similar to a naturally occurring amino acid.

[0212] Naturally occurring α-amino acids include, without limitation, alanine (Ala), cysteine (Cys), aspartic acid (Asp), glutamic acid (Glu), phenylalanine (Phe), glycine (Gly), histidine (His), isoleucine (Ile), arginine (Arg), lysine (Lys), leucine (Leu), methionine (Met), asparagine (Asn), proline (Pro), glutamine (Gln), serine (Ser), threonine (Thr), valine (Val), tryptophan (Trp), tyrosine (Tyr), and combinations thereof. Stereoisomers of a naturally-occurring α-amino acids include, without limitation, D-alanine (D-Ala), D-cysteine (D-Cys), D-aspartic acid (D-Asp), D-glutamic acid (D-Glu), D-phenylalanine (D-Phe), D-histidine (D-His), D-isoleucine (D-Ile), D-arginine (D-Arg), D-lysine (D-Lys), D-leucine (D-Leu), D-methionine (D-Met), D-asparagine (D-Asn), D-proline (D-Pro), D-glutamine (D-Gln), D-serine (D-Ser), D-threonine (D-Thr), D-valine (D-Val), D-tryptophan (D-Trp), D-tyrosine (D-Tyr), and combinations thereof.

[0213] Amino acids may be referred to herein by either their commonly known three letter symbols or by the one-letter symbols recommended by the IUPAC-IUB Biochemical Nomenclature Commission.

[0214] The terms “polypeptide” and “peptide” are used interchangeably herein to refer to a polymer of amino acid residues in a single chain. The terms apply to amino acid polymers in which one or more amino acid residue is an artificial chemical mimetic of a corresponding naturally occurring amino acid, as well as to naturally occurring amino acid polymers and non-naturally occurring amino acid polymers. Amino acid polymers may comprise entirely L-amino acids, entirely D-amino acids, or a mixture of L and D amino acids.

[0215] The term “protein” as used herein refers to either a polypeptide or a dimer (i.e. two) or multimer (i.e., three or more) of single chain polypeptides. The single chain polypeptides of a protein may be joined by a covalent bond, e.g., a disulfide bond, or non-covalent interactions.

[0216] The term “conservative substitution,” “conservative mutation,” or “conservatively modified variant” refers to an alteration that results in the substitution of an amino acid with another amino acid that can be categorized as having a similar feature. Examples of categories of conservative amino acid groups defined in this manner can include: a “charged/polar group” including Glu (Glutamic acid or E), Asp (Aspartic acid or D), Asn (Asparagine or N), Gln (Glutamine or Q), Lys (Lysine or K), Arg (Arginine or R), and His (Histidine or H); an “aromatic group” including Phe (Phenylalanine or F), Tyr (Tyrosine or Y), Trp (Tryptophan or W), and (Histidine or H); and an “aliphatic group” including Gly (Glycine or G), Ala (Alanine or A), Val (Valine or V), Leu (Leucine or L), Ile (Isoleucine or I), Met (Methionine or M), Ser (Serine or S), Thr (Threonine or T), and Cys (Cysteine or C). Within each group, subgroups can also be identified. For example, the group of charged or polar amino acids can be sub-divided into sub-groups including: a “positively-charged sub-group” comprising Lys, Arg and His; a “negatively-charged sub-group” comprising Glu and Asp; and a “polar sub-group” comprising Asn and Gln. In another example, the aromatic or cyclic group can be sub-divided into sub-groups including: a “nitrogen ring sub-group” comprising Pro, His and Trp; and a “phenyl sub-group” comprising Phe and Tyr. In another further example, the aliphatic group can be sub-divided into sub-groups, e.g., an “aliphatic non-polar sub-group” comprising Val, Leu, Gly, and Ala; and an “aliphatic slightly-polar sub-group” comprising Met, Ser, Thr, and Cys. Examples of categories of conservative mutations include amino acid substitutions of amino acids within the sub-groups above, such as, but not limited to: Lys for Arg or vice versa, such that a positive charge can be maintained; Glu for Asp or vice versa, such that a negative charge can be maintained; Ser for Thr or vice versa, such that a free —OH can be maintained; and Gln for Asn or vice versa, such that a free —NH₂ can be maintained. In some embodiments, hydrophobic amino acids are substituted for naturally occurring hydrophobic amino acid, e.g., in the active site, to preserve hydrophobicity.

[0217] The terms “identical” or percent “identity,” in the context of two or more polypeptide sequences, refer to two or more sequences or subsequences that are the same or have a specified percentage of amino acid residues, e.g., at least 60% identity, at least 65%, at least 70%, at least 75%, at least 80%, at least 85%, at least 90%, or at least 95% or greater, that are identical over a specified region when compared and aligned for maximum correspondence over a comparison window, or designated region as measured using a sequence comparison algorithm or by manual alignment and visual inspection.

[0218] For sequence comparison of polypeptides, typically one amino acid sequence acts as a reference sequence, to which a candidate sequence is compared. Alignment can be performed using various methods available to one of skill in the art, e.g., visual alignment or using publicly available software using known algorithms to achieve maximal alignment. Such programs include the BLAST programs, ALIGN, ALIGN-2 (Genentech, South San Francisco, Calif.) or Megalign (DNASTAR). The parameters employed for an alignment to achieve maximal alignment can be determined by one of skill in the art. For sequence comparison of polypeptide sequences for purposes of this application, the BLASTP algorithm standard protein BLAST for aligning two proteins sequence with the default parameters is used.

[0219] The terms “corresponding to,” “determined with reference to,” or “numbered with reference to” when used in the context of the identification of a given amino acid residue in a polypeptide sequence, refers to the position of the residue of a specified reference sequence when the given amino acid sequence is maximally aligned and compared to the reference sequence. Thus, for example, an amino acid residue in a modified Fc polypeptide “corresponds to” an amino acid in SEQ ID NO:1, when the residue aligns with the amino acid in SEQ ID NO:1 when optimally aligned to SEQ ID NO:1. The polypeptide that is aligned to the reference sequence need not be the same length as the reference sequence.

[0220] A “binding affinity” as used herein refers to the strength of the non-covalent interaction between two molecules, e.g., a single binding site on a polypeptide and a target, e.g., transferrin receptor, to which it binds. Thus, for example, the term may refer to 1:1 interactions between a polypeptide and its target, unless otherwise indicated or clear from context. Binding affinity may be quantified by measuring an equilibrium dissociation constant (K_{D}), which refers to the dissociation rate constant (k_{d}, time⁻¹) divided by the association rate constant (kₐ, time⁻¹ M⁻¹). K_{D} can be determined by measurement of the kinetics of complex formation and dissociation, e.g., using Surface Plasmon Resonance (SPR) methods, e.g., a Biacore™ system; kinetic exclusion assays such as KinExA®; and BioLayer interferometry (e.g., using the ForteBio® Octet® platform). As used herein, “binding affinity” includes not only formal binding affinities, such as those reflecting 1:1 interactions between a polypeptide and its target, but also apparent affinities for which K_{D}'s are calculated that may reflect avid binding.

[0221] The phrase “specifically binds” or “selectively binds” to a target, e.g., transferrin receptor, when referring to a polypeptide comprising a transferrin receptor-binding modified Fc polypeptide as described herein, refers to a binding reaction whereby the polypeptide binds to the target with greater affinity, greater avidity, and/or greater duration than it binds to a structurally different target, e.g., a target not in the transferrin receptor family. In typical embodiments, the polypeptide has at least 5-fold, 10-fold, 25-fold, 50-fold, 100-fold, 1000-fold, 10,000-fold, or greater affinity for a transferrin receptor compared to an unrelated target when assayed under the same affinity assay conditions. The term “specific binding,” “specifically binds to,” or “is specific for” a particular target (e.g., TfR), as used herein, can be exhibited, for example, by a molecule having an equilibrium dissociation constant KD for the target to which it binds of, e.g., 10⁻⁴ M or smaller, e.g., 10⁻⁵ M, 10⁻⁶ M, 10⁻⁷ M, 10⁻⁸ M, 10⁻⁹ M, 10⁻¹⁰ M, 10⁻¹¹ M, or 10⁻¹² M. In some embodiments, a modified Fc polypeptide specifically binds to an epitope on a transferrin receptor that is conserved among species (e.g., structurally conserved among species), e.g., conserved between non-human primate and human species (e.g., structurally conserved between non-human primate and human species). In some embodiments, a polypeptide may bind exclusively to a human transferrin receptor.

[0222] The terms “treatment,” “treating,” and the like are used herein to generally mean obtaining a desired pharmacologic and/or physiologic effect. “Treating” or “treatment” may refer to any indicia of success in the treatment or amelioration of a disease, including progranulin-associated disorders, such as neurodegenerative diseases (e.g., frontotemporal dementia (FTD), neuronal ceroid lipofuscinosis (NCL), Niemann-Pick disease type A (NPA), Niemann-Pick disease type B (NPB), Niemann-Pick disease type C (NPC), C9ORF72-associated amyotrophic lateral sclerosis (ALS)/FTD, sporadic ALS, Alzheimer's disease (AD), Gaucher's disease (e.g., Gaucher's disease types 2 and 3), and Parkinson's disease), atherosclerosis, a disorder associated with TDP-43, and age-related macular degeneration (AMD), including any objective or subjective parameter such as abatement, remission, improvement in patient survival, increase in survival time or rate, diminishing of symptoms or making the disorder more tolerable to the patient, slowing in the rate of degeneration or decline, or improving a patient's physical or mental well-being. The treatment or amelioration of symptoms can be based on objective or subjective parameters. The effect of treatment can be compared to an individual or pool of individuals not receiving the treatment, or to the same patient prior to treatment or at a different time during treatment.

[0223] The term “subject,” “individual,” and “patient,” as used interchangeably herein, refer to a mammal, including but not limited to humans, non-human primates, rodents (e.g., rats, mice, and guinea pigs), rabbits, cows, pigs, horses, and other mammalian species. In one embodiment, the patient is a human.

[0224] The term “pharmaceutically acceptable excipient” refers to a non-active pharmaceutical ingredient that is biologically or pharmacologically compatible for use in humans or animals, such as but not limited to a buffer, carrier, or preservative.

[0225] As used herein, a “therapeutic amount” or “therapeutically effective amount” of an agent is an amount of the agent that treats symptoms of a disease in a subject.

[0226] The term “administer” refers to a method of delivering agents, compounds, or compositions to the desired site of biological action. These methods include, but are not limited to, topical delivery, parenteral delivery, intravenous delivery, intradermal delivery, intramuscular delivery, intrathecal delivery, colonic delivery, rectal delivery, or intraperitoneal delivery. In one embodiment, the polypeptides described herein are administered intravenously.

### III. Progranulin Replacement Therapy

[0227] In some aspects, described herein is a fusion protein that comprises: (i) an Fc polypeptide, which may contain modifications (e.g., one or more modifications that promote heterodimerization) or may be a wild-type Fc polypeptide; and a progranulin polypeptide; and (ii) an Fc polypeptide, which may contain modifications (e.g., one or more modifications that promote heterodimerization) or may be a wild-type Fc polypeptide; and optionally a progranulin polypeptide. In some embodiments, one or both Fc polypeptides may contain modifications that result in binding to a blood-brain barrier (BBB) receptor, e.g., a transferrin receptor (TfR). The progranulin polypeptide may be deficient in neurodegenerative diseases. The progranulin polypeptide may be deficient in frontotemporal dementia (FTD), as well as in other diseases, such as Gaucher's disease and Alzheimer's disease (AD). A progranulin polypeptide incorporated into the fusion protein may bind to sortilin or prosaposin. In particular embodiments, the progranulin polypeptide incorporated into the fusion protein to sortilin.

[0228] In some embodiments, a fusion protein comprising a progranulin polypeptide and optionally a modified Fc polypeptide that binds to a BBB receptor, e.g., a TfR-binding Fc polypeptide, comprises a variant of a progranulin polypeptide.

[0229] In some embodiments, a progranulin polypeptide or a variant thereof, that is present in a fusion protein described herein, retains at least 25% of its activity compared to its activity when not joined to an Fc polypeptide or a TfR-binding Fc polypeptide. In some embodiments, a progranulin polypeptide or a variant thereof, that is present in a fusion protein described herein, retains at least 10%, or at least 15%, 20%, 25%, 30%, 35%, 40%, 45%, 50%, 55%, 60%, 65%, 70%, 75%, 80%, 85%, 90%, or 95%, of its activity compared to its activity when not joined to an Fc polypeptide or a TfR-binding Fc polypeptide. In some embodiments, a progranulin polypeptide or a variant thereof, that is present in a fusion protein described herein, retains at least 80%, 85%, 90%, or 95% of its activity compared to its activity when not joined to an Fc polypeptide or a TfR-binding Fc polypeptide. A fusion protein described herein can be an Fc dimer:PGRN fusion protein comprising: (a) a sequence that has at least 85% identity, at least 90% identity, at least 95% identity, or 100% identity to the sequence of SEQ ID NO:215, and (b) a sequence that has at least 85% identity, at least 90% identity, at least 95% identity, or 100% identity to the sequence of SEQ ID NO:210. A fusion protein described herein can be an Fc dimer:PGRN fusion protein comprising: (a) a sequence that has at least 85% identity, at least 90% identity, at least 95% identity, or 100% identity to the sequence of SEQ ID NO:227, and (b) a sequence that has at least 85% identity, at least 90% identity, at least 95% identity, or 100% identity to the sequence of SEQ ID NO:210. A fusion protein described herein can be an Fc dimer:PGRN fusion protein comprising: (a) a sequence that has at least 85% identity, at least 90% identity, at least 95% identity, or 100% identity to the sequence of SEQ ID NO:215, and (b) a sequence that has at least 85% identity, at least 90% identity, at least 95% identity, or 100% identity to the sequence of SEQ ID NO:291. A fusion protein described herein can be an Fc dimer:PGRN fusion protein comprises: an Fc dimer:PGRN fusion protein comprising: (a) a sequence that has at least 85% identity, at least 90% identity, at least 95% identity, or 100% identity to the sequence of SEQ ID NO:227, and (b) a sequence that has at least 85% identity, at least 90% identity, at least 95% identity, or 100% identity to the sequence of SEQ ID NO:291.

[0230] In some embodiments, fusion to an Fc polypeptide does not decrease the expression and/or activity of the progranulin polypeptide or variant thereof. In some embodiments, fusion to a TfR-binding Fc polypeptide does not decrease the expression and/or activity of the progranulin polypeptide.

### IV. Indications

[0231] In some embodiments, the fusion proteins described herein comprising a progranulin polypeptide are useful in the treatment of one or more neurodegenerative diseases selected from the group consisting of Alzheimer's disease, primary age-related tauopathy, lewy body dementia, progressive supranuclear palsy (PSP), frontotemporal dementia, frontotemporal dementia with parkinsonism linked to chromosome 17, argyrophilic grain dementia, amyotrophic lateral sclerosis, amyotrophic lateral sclerosis/parkinsonism-dementia complex of Guam (ALS-PDC), corticobasal degeneration, chronic traumatic encephalopathy, Creutzfeldt-Jakob disease, dementia pugilistica, diffuse neurofibrillary tangles with calcification, Down's syndrome, familial British dementia, familial Danish dementia, Gerstmann-Straussler-Scheinker disease, globular glial tauopathy, Guadeloupean parkinsonism with dementia, Guadelopean PSP, Hallevorden-Spatz disease, hereditary diffuse leukoencephalopathy with spheroids (HDLS), inclusion-body myositis, multiple system atrophy, myotonic dystrophy, Nasu-Hakola disease, neurofibrillary tangle-predominant dementia, Niemann-Pick disease type C, pallido-ponto-nigral degeneration, Parkinson's disease, Pick's disease, postencephalitic parkinsonism, prion protein cerebral amyloid angiopathy, progressive subcortical gliosis, subacute sclerosing panencephalitis, and tangle only dementia.

[0232] A progranulin-associated disorder may be a neurodegenerative disease. A number of neurodegenerative diseases may be caused by or linked to lysosomal storage disorders characterized by the accumulation of undigested or partially digested macromolecules, which ultimately results in cellular and organismal dysfunction as well as clinical abnormalities. Lysosomal storage disorders are defined by the type of accumulated substrate, and may be classified as cholesterol storage disorders, sphingolipidoses, oligosaccharidoses, mucolipidoses, mucopolysaccharidoses, lipoprotein storage disorders, neuronal ceroid lipofuscinoses, and others. In some cases, lysosomal storage disorders also include deficiencies or defects in proteins that result in accumulation of macromolecules, such as proteins necessary for normal post-translational modification of lysosomal enzymes, or proteins important for proper lysosomal trafficking. Examples of neurodegenerative diseases that may be caused by or linked to lysosomal storage disorders include, e.g., frontotemporal dementia (FTD), neuronal ceroid lipofuscinosis (NCL), Niemann-Pick disease type A (NPA), Niemann-Pick disease type B (NPB), Niemann-Pick disease type C (NPC), C9ORF72-associated amyotrophic lateral sclerosis (ALS)/FTD, sporadic ALS, Alzheimer's disease (AD), Gaucher's disease (e.g., Gaucher's disease types 2 and 3), and Parkinson's disease. Examples of other progranulin-associated disorders include, e.g., atherosclerosis, a disorder associated with TDP-43, and age-related macular degeneration (AMD). Such progranulin-associated disorders (e.g., a neurodegenerative disease, such as frontotemporal dementia (FTD)) may benefit from the fusion proteins or polypeptides comprising a progranulin polypeptide or a variant thereof as described herein.

[0233] Frontotemporal dementia (FTD) is a progressive neurodegenerative disorder. FTD includes a spectrum of clinically, pathologically, and genetically heterogeneous diseases presenting selective involvement of the frontal and temporal lobes (Gazzina et al., Eur J Pharmacol. 817:76-85, 2017). Clinical manifestations of FTD include alterations in behavior and personality, frontal executive deficits, and language dysfunction. Based on the diversity of clinical phenotypes, different presentations have been identified, such as behavioral variants of FTD (bvFTD) and primary progressive aphasia (PPA), which can either be the nonfluent/agrammatic variant PPA (avPPA) or the semantic variant PPA (svPPA). These clinical presentations can also overlap with atypical parkinsonism, such as corticobasal syndrome (CBS), progressive supranuclear palsy (PSP), and amyotrophic lateral sclerosis (ALS) (Gazzina et al., Eur J Pharmacol. 817:76-85, 2017). FTD is associated with various neuropathological hallmarks, including tau pathology in neurons and astrocytes or cytoplasmic ubiquitin inclusions in neurons. The Trans-activating DNA-binding Protein with a molecular weight of 43 kDa (TDP-43) is the most prominent, ubiquitinated protein pathology accumulating in the majority of cases of FTD as well as in ALS (Petkau and Leavitt, Trends Neurosci. 37(7):388-98, 2014). FTD is a significant cause of early-onset dementia with up to 80% of cases presenting between ages 45 and 64. The disease also presents a significant familial component, with about 30-50% of cases reporting family history of the disease (Petkau and Leavitt, supra).

[0234] While several genes have been linked to FTD, one of the most frequently mutated genes in FTD is GRN, which maps to human chromosome 17q21 and encodes the cysteine-rich protein progranulin (also known as proepithelin and acrogranin). Recent estimates suggest that GRN mutations account for 5-20% of FTD patients with positive family history and 1-5% of sporadic cases (Rademakers et al., supra). The precise molecular and cellular mechanisms underlying neurodegeneration and disease processes in GRN-associated FTD are unknown, although phenotypic characterization of GRN-knockout mice combined with histological analyses of patients' brain suggests that both inflammation and lysosomal defects are central to the disease (Kao et al., Nat Rev Neurosci. 18(6):325-333, 2017). Indeed, massive gliosis is present in cortical regions of patients (Lui et al., Cell. 165(4):921-35, 2016) and lipofuscin, a lysosomal pigment denoting lysosomal disorder, has been reported in the eye and cortex of mutated GRNcarriers including both presymptomatic individuals and patients (Ward et al., Sci Transl Med. 9(385), 2017).

[0235] More than seventy GRN disease mutations have been reported and mapped throughout the gene, where they result in confirmed or predicted loss of function (LOF) alleles (Ji et al. J Med Genet. 54:145-154, 2017). Most heterozygous mutations linked to FTD cause about 50% reduction in mRNA level primarily as a result of non-sense mRNA decay and a comparable reduction in progranulin protein level (Petkau and Leavitt, supra: Kao et al., supra). Lower levels of progranulin are also found in the blood (serum) and cerebrospinal fluid (CSF) of carriers, including presymptomatic individuals (Finch et al., Nat Rev Neurosci. 18(6):325-333, 2017; Goossens et al., Alzheimers Res Ther. 10(1):31, 2018; Meeter et al., Dement Geriatr Cogn Dis Extra. 6(2):330-340, 2016). Therefore, haplo-insufficiency is believed to be the main disease mechanism in GRN-associated FTD, suggesting that therapeutic approaches that elevate progranulin levels in carriers may delay the age of onset as well as the progression of FTD (Petkau and Leavitt, supra; Kao et al., supra). This notion is supported by human genetic studies indicating that a variant of the gene TMFM106B both enhances the levels of progranulin by 25% and delay the age of onset of GRN-associated FTD by 13 years (Nicholson and Rademakers, Acta Neuropathol. 132(5):639-651, 2016).

[0236] Homozygous GRN mutations have also been reported, although carriers present a vastly different clinical phenotype known as neuronal ceroid lipofuscinosis (NCL) (Batten disease; incidence 1-2.5 in 100,000 live births; Cotman et al., Curr Neurol Neurosci Rep. 13(8):366, 2013), which is a lysosomal storage disorder (Smith et al., Am J Hum Genet. 90(6):1102-7, 2012; Almeida et al., Neurobiol Aging. 41:200.e1-200.e5, 2016). GRN is in fact one of the 14 ceroid-lipofuscinosis neuronal (CLN) genes reported to be linked to NCL and GRN is also known as CLN11 (Kollmann et al., Biochim Biophys Acta. 1832(11):1866-81, 2013). The fusion proteins or polypeptides comprising a progranulin polypeptide or a variant thereof as described herein may exhibit anti-inflammatory properties and enhances lysosomal function, either of which may be beneficial in NCL.

[0237] Patients with Gaucher's disease who carry homozygous mutations in the GBA gene have lower levels of progranulin in their serum (Jian et al., EBioMedicine 11:127-137, 2016). Parkinson's disease patients with heterozygous mutations in GBA may also have lower levels of progranulin. The fusion proteins or polypeptides comprising a progranulin polypeptide or a variant thereof as described herein may provide therapeutic benefits in treating Gaucher's disease or Parkinson's disease.

[0238] Variants in GRN have been linked to AD (Rademakers et al., supra: Brouwers et al., Neurology. 71(9):656-64, 2008; Lee et al., Neurodegener Dis. 8(4):216-20, 2011; Viswanathan et al., Am J Med Genet B Neuropsychiatr Genet. 150B(5):747-50, 2009) and the TDP-43 pathology is common in the brain of AD patients (Youmans and Wolozin, Exp Neurol. 237(1):90-5, 2012). Progranulin gene delivery has also been shown to decrease amyloid burden in mouse models of AD (van Kampen and Kay, PLoS One. 12(8):e0182896, 2017). Thus, the fusion proteins or polypeptides comprising a progranulin polypeptide or a variant thereof as described herein may also confer therapeutic benefits in treating AD.

[0239] Niemann-Pick disease types A and B (NPA and NPB) result from mutations in the gene encoding acid sphingomyelinase (SMPD1). Niemann-Pick disease type C (NPC) results from mutations in the genes involved in cholesterol transport, i.e., NPC1 and NPC2 (Kolter and Sandhoff, Annu Rev Cell Dev Biol. 21:81-103, 2005; Kobayashi et al., Nat Cell Biol. 1(2):113-8, 1999). The fusion proteins or polypeptides comprising a progranulin polypeptide or a variant thereof as described herein may provide therapeutic benefits in treating NPA, NPB, and/or NPC.

[0240] The vast majority of ALS cases present the TDP-43 pathology, which is also shared with patients harboring GRN mutations (Petkau and Leavitt, Trends Neurosci. 37(7):388-98, 2014; Rademakers et al., Nat Rev Neurol. 8(8):423-34, 2012). Among all ALS cases, GGGGCC repeat expansions within the C9ORF72 gene are the most common cause of ALS and a significant cause of FTD. The average mutation frequencies reported in North American and European populations are 37% for familial ALS, 6% for sporadic ALS, 21% for familial FTD, and 6% for sporadic FTD patients (Rademakers et al., supra). Additionally, the TMEM106B variant that is protective in GRN-associated FTD is also protective in FTD patients harboring repeat expansions in the C9ORF72 gene (van Blitterswijk et al., Acta Neuropathol. 127(3):397-406, 2014). The fusion proteins or polypeptides comprising a progranulin polypeptide or a variant thereof as described herein may reduce TDP-43 pathology in C9ORF72-associated ALS/FTD by promoting lysosomal function and/or decreasing inflammation.

[0241] AMD is a degenerative disease and a major cause of blindness in the developed world. It causes damage to the macula, a small spot near the center of the retina and the part of the eye needed for sharp, central vision. The degenerative changes in the eye and loss of vision may be caused by impaired function of lysosomes and harmful protein accumulations behind the retina (Viiri et al., PloS One. 8(7):e69563, 2013). As the disease progresses, retinal sensory cells in the central vision area are damaged, leading to loss of central vision. The fusion proteins or polypeptides comprising a progranulin polypeptide or a variant thereof as described herein may provide therapeutic benefits in treating AMD.

### V. FC Polypeptide Modifications for Blood-Brain Barrier (BBB) Receptor Binding

[0242] In some aspects, provided herein are fusion proteins that are capable of being transported across the blood-brain barrier (BBB). Such a protein comprises a modified Fc polypeptide that binds to a BBB receptor. BBB receptors are expressed on BBB endothelia, as well as other cell and tissue types. In some embodiments, the BBB receptor is transferrin receptor (TfR).

[0243] Amino acid residues designated in various Fc modifications, including those introduced in a modified Fc polypeptide that binds to a BBB receptor, e.g., TfR, are numbered herein using EU index numbering. Any Fc polypeptide, e.g., an IgG1, IgG2, IgG3, or IgG4 Fc polypeptide, may have modifications, e.g., amino acid substitutions, in one or more positions as described herein.

[0244] A modified (e.g., enhancing heterodimerization and/or BBB receptor-binding) Fc polypeptide present in a fusion protein described herein can have at least 70% identity, at least 75% identity, at least 80% identity, at least 85% identity, at least 90% identity, or at least 95% identity to a native Fc region sequence or a fragment thereof, e.g., a fragment of at least 50 amino acids or at least 100 amino acids, or greater in length. In some embodiments, the native Fc amino acid sequence is the Fc region sequence of SEQ ID NO:1. In some embodiments, the modified Fc polypeptide has at least 70% identity, at least 75% identity, at least 80% identity, at least 85% identity, at least 90% identity, or at least 95% identity to amino acids 1-110 of SEQ ID NO:1, or to amino acids 111-217 of SEQ ID NO:1, or a fragment thereof, e.g., a fragment of at least 50 amino acids or at least 100 amino acids, or greater in length.

[0245] In some embodiments, a modified (e.g., enhancing heterodimerization and/or BBB receptor-binding) Fc polypeptide comprises at least 50 amino acids, or at least 60, 65, 70, 75, 80, 85, 90, or 95 or more, or at least 100 amino acids, or more, that correspond to a native Fc region amino acid sequence. In some embodiments, the modified Fc polypeptide comprises at least 25 contiguous amino acids, or at least 30, 35, 40, or 45 contiguous amino acids, or 50 contiguous amino acids, or at least 60, 65, 70, 75, 80 85, 90, or 95 or more contiguous amino acids, or 100 or more contiguous amino acids, that correspond to a native Fc region amino acid sequence, such as SEQ ID NO:1.

[0246] In some embodiments, the domain that is modified for BBB receptor-binding activity is a human Ig CH3 domain, such as an IgG1 CH3 domain. The CH3 domain can be of any IgG subtype, i.e., from IgG1, IgG2, IgG3, or IgG4. In the context of IgG1 antibodies, a CH3 domain refers to the segment of amino acids from about position 341 to about position 447 as numbered according to the EU numbering scheme.

[0247] In some embodiments, the domain that is modified for BBB receptor-binding activity is a human Ig CH2 domain, such as an IgG CH2 domain. The CH2 domain can be of any IgG subtype, i.e., from IgG1, IgG2, IgG3, or IgG4. In the context of IgG1 antibodies, a CH2 domain refers to the segment of amino acids from about position 231 to about position 340 as numbered according to the EU numbering scheme.

[0248] In some embodiments, a modified (e.g., BBB receptor-binding) Fc polypeptide present in a fusion protein described herein comprises at least one, two, or three substitutions; and in some embodiments, at least four five, six, seven, eight, nine, or ten substitutions at amino acid positions comprising 266, 267, 268, 269, 270, 271, 295, 297, 298, and 299, according to the EU numbering scheme.

[0249] In some embodiments, a modified (e.g., BBB receptor-binding) Fc polypeptide present in a fusion protein described herein comprises at least one, two, or three substitutions; and in some embodiments, at least four, five, six, seven, eight, or nine substitutions at amino acid positions comprising 274, 276, 283, 285, 286, 287, 288, 289, and 290, according to the EU numbering scheme.

[0250] In some embodiments, a modified (e.g., BBB receptor-binding) Fc polypeptide present in a fusion protein described herein comprises at least one, two, or three substitutions; and in some embodiments, at least four, five, six, seven, eight, nine, or ten substitutions at amino acid positions comprising 268, 269, 270, 271, 272, 292, 293, 294, 296, and 300, according to the EU numbering scheme.

[0251] In some embodiments, a modified (e.g., BBB receptor-binding) Fc polypeptide present in a fusion protein described herein comprises at least one, two, or three substitutions; and in some embodiments, at least four, five, six, seven, eight, or nine substitutions at amino acid positions comprising 272, 274, 276, 322, 324, 326, 329, 330, and 331, according to the EU numbering scheme.

[0252] In some embodiments, a modified (e.g., BBB receptor-binding) Fc polypeptide present in a fusion protein described herein comprises at least one, two, or three substitutions; and in some embodiments, at least four, five, six, or seven substitutions at amino acid positions comprising 345, 346, 347, 349, 437, 438, 439, and 440, according to the EU numbering scheme.

[0253] In some embodiments, a modified (e.g., BBB receptor-binding) Fc polypeptide present in a fusion protein described herein comprises at least one, two, or three substitutions; and in some embodiments, at least four, five, six, seven, eight, or nine substitutions at amino acid positions 384, 386, 387, 388, 389, 390, 413, 416, and 421, according to the EU numbering scheme.

### FcRn Binding Sites

[0254] In certain aspects, modified (e.g., BBB receptor-binding) Fc polypeptides, or Fc polypeptides present in a fusion protein described herein that do not specifically bind to a BBB receptor, can also comprise an FcRn binding site. In some embodiments, the FcRn binding site is within the Fc polypeptide or a fragment thereof.

[0255] In some embodiments, the FcRn binding site comprises a native FcRn binding site. In some embodiments, the FcRn binding site does not comprise amino acid changes relative to the amino acid sequence of a native FcRn binding site. In some embodiments, the native FcRn binding site is an IgG binding site, e.g., a human IgG binding site. In some embodiments, the FcRn binding site comprises a modification that alters FcRn binding.

[0256] In some embodiments, an FcRn binding site has one or more amino acid residues that are mutated, e.g., substituted, wherein the mutation(s) increase serum half-life or do not substantially reduce serum half-life (i.e., reduce serum half-life by no more than 25% compared to a counterpart modified Fc polypeptide having the wild-type residues at the mutated positions when assayed under the same conditions). In some embodiments, an FcRn binding site has one or more amino acid residues that are substituted at positions 250-256, 307, 380, 428, and 433-436, according to the EU numbering scheme.

[0257] In some embodiments, one or more residues at or near an FcRn binding site are mutated, relative to a native human IgG sequence, to extend serum half-life of the modified polypeptide. In some embodiments, mutations are introduced into one, two, or three of positions 252, 254, and 256. In some embodiments, the mutations are M252Y, S254T, and T256E. In some embodiments, a modified Fc polypeptide further comprises the mutations M252Y, S254T, and T256E. In some embodiments, a modified Fc polypeptide comprises a substitution at one, two, or all three of positions T307, E380, and N434, according to the EU numbering scheme. In some embodiments, the mutations are T307Q and N434A. In some embodiments, a modified Fc polypeptide comprises mutations T307A, E380A, and N434A. In some embodiments, a modified Fc polypeptide comprises substitutions at positions T250 and M428, according to the EU numbering scheme. In some embodiments, the modified Fc polypeptide comprises mutations T250Q and/or M428L. In some embodiments, a modified Fc polypeptide comprises substitutions at positions M428 and N434, according to the EU numbering scheme. In some embodiments, the modified Fc polypeptide comprises mutations M428L and N434S. In some embodiments, a modified Fc polypeptide comprises an N434S or N434A mutation.

### VI. Transferrin Receptor-Binding Fc Polypeptides

[0258] This section describes generation of modified Fc polypeptides in accordance with the disclosure that bind to transferrin receptor (TfR) and are capable of being transported across the blood-brain barrier (BBB).

### TfR-Binding Fc Polypeptides Comprising Mutations in the CH3 Domain

[0259] In some embodiments, a modified Fc polypeptide that specifically binds to TfR comprises substitutions in a CH3 domain. In some embodiments, a modified Fc polypeptide comprises a human Ig CH3 domain, such as an IgG CH3 domain, that is modified for TfR-binding activity. The CH3 domain can be of any IgG subtype, i.e., from IgG1, IgG2, IgG3, or IgG4. In the context of IgG antibodies, a CH3 domain refers to the segment of amino acids from about position 341 to about position 447 as numbered according to the EU numbering scheme.

[0260] In some embodiments, a modified Fc polypeptide that specifically binds to TfR binds to the apical domain of TfR and may bind to TfR without blocking or otherwise inhibiting binding of transferrin to TfR. In some embodiments, binding of transferrin to TfR is not substantially inhibited. In some embodiments, binding of transferrin to TfR is inhibited by less than about 50% (e.g., less than about 45%, 40%, 35%, 30%, 25%, 20%, 15%, 10%, or 5%). In some embodiments, binding of transferrin to TfR is inhibited by less than about 20%/0 (e.g., less than about 19%, 18%, 17%, 16%, 15%, 14%, 13%, 12%, 11%, 10%, 9%, 8%, 7%, 6%, 5%, 4%, 3%, 2%, or 1%).

[0261] In some embodiments, a modified Fc polypeptide that specifically binds to TfR comprises at least two, three, four, five, six, seven, eight, or nine substitutions at positions 384, 386, 387, 388, 389, 390, 413, 416, and 421, according to the EU numbering scheme. Illustrative substitutions that may be introduced at these positions are shown in Tables 6 and 7 at the end of the Examples section. In some embodiments, the amino acid at position 388 and/or 421 is an aromatic amino acid, e.g., Trp, Phe, or Tyr. In some embodiments, the amino acid at position 388 is Trp. In some embodiments, the aromatic amino acid at position 421 is Trp or Phe.

[0262] In some embodiments, at least one position as follows is substituted: Leu, Tyr, Met, or Val at position 384: Leu, Thr, His, or Pro at position 386; Val, Pro, or an acidic amino acid at position 387; an aromatic amino acid, e.g., Trp at position 388; Val, Ser, or Ala at position 389; an acidic amino acid, Ala, Ser, Leu, Thr, or Pro at position 413; Thr or an acidic amino acid at position 416; or Trp, Tyr, His, or Phe at position 421. In some embodiments, the modified Fc polypeptide may comprise a conservative substitution, e.g., an amino acid in the same charge grouping, hydrophobicity grouping, side chain ring structure grouping (e.g., aromatic amino acids), or size grouping, and/or polar or non-polar grouping, of a specified amino acid at one or more of the positions in the set. Thus, for example, Ile may be present at position 384, 386, and/or position 413. In some embodiments, the acidic amino acid at position one, two, or each of positions 387, 413, and 416 is Glu. In other embodiments, the acidic amino acid at one, two or each of positions 387, 413, and 416 is Asp. In some embodiments, two, three, four, five, six, seven, or all eight of positions 384, 386, 387, 388, 389, 413, 416, and 421 have an amino acid substitution as specified in this paragraph.

[0263] In some embodiments, an Fc polypeptide that is modified as described in the preceding two paragraphs comprises a native Asn at position 390. In some embodiments, the modified Fc polypeptide comprises Gly, His, Gln, Leu, Lys, Val, Phe, Ser, Ala, or Asp at position 390. In some embodiments, the modified Fc polypeptide further comprises one, two, three, or four substitutions at positions comprising 380, 391, 392, and 415, according to the EU numbering scheme. In some embodiments, Trp, Tyr, Leu, or Gln may be present at position 380. In some embodiments, Ser, Thr, Gln, or Phe may be present at position 391. In some embodiments, Gln, Phe, or His may be present at position 392. In some embodiments, Glu may be present at position 415.

[0264] In certain embodiments, the modified Fc polypeptide comprises two, three, four, five, six, seven, eight, nine, ten, or eleven positions selected from the following: Trp, Leu, or Glu at position 380; Tyr or Phe at position 384; Thr at position 386; Glu at position 387; Trp at position 388; Ser, Ala, Val, or Asn at position 389; Ser or Asn at position 390; Thr or Ser at position 413; Glu or Ser at position 415; Glu at position 416; and/or Phe at position 421. In some embodiments, the modified Fc polypeptide comprises all eleven positions as follows: Trp, Leu, or Glu at position 380; Tyr or Phe at position 384; Thr at position 386; Glu at position 387; Trp at position 388: Ser, Ala, Val, or Asn at position 389; Ser or Asn at position 390; Thr or Ser at position 413; Glu or Ser at position 415; Glu at position 416; and/or Phe at position 421.

[0265] In certain embodiments, the modified Fc polypeptide comprises Leu or Met at position 384; Leu, His, or Pro at position 386; Val at position 387; Trp at position 388; Val or Ala at position 389; Pro at position 413; Thr at position 416; and/or Trp at position 421. In some embodiments, the modified Fc polypeptide further comprises Ser, Thr, Gln, or Phe at position 391. In some embodiments, the modified Fc polypeptide further comprises Trp, Tyr, Leu, or Gln at position 380 and/or Gln, Phe, or His at position 392. In some embodiments, Trp is present at position 380 and/or Gln is present at position 392. In some embodiments, the modified Fc polypeptide does not have a Trp at position 380.

[0266] In other embodiments, the modified Fc polypeptide comprises Tyr at position 384; Thr at position 386; Glu or Val and position 387; Trp at position 388; Ser at position 389; Ser or Thr at position 413; Glu at position 416; and/or Phe at position 421. In some embodiments, the modified Fc polypeptide comprises a native Asn at position 390. In certain embodiments, the modified Fc polypeptide further comprises Trp, Tyr, Leu, or Gln at position 380; and/or Glu at position 415. In some embodiments, the modified Fc polypeptide further comprises Tip at position 380 and/or Glu at position 415.

[0267] In additional embodiments, the modified Fc polypeptide further comprises one, two, or three substitutions at positions comprising 414, 424, and 426, according to the EU numbering scheme. In some embodiments, position 414 is Lys, Arg, Gly, or Pro; position 424 is Ser, Thr, Glu, or Lys; and/or position 426 is Ser, Trp, or Gly.

[0268] In some embodiments, the modified Fc polypeptide comprises one or more of the following substitutions: Trp at position 380; Thr at position 386; Trp at position 388; Val at position 389; Thr or Ser at position 413; Glu at position 415; and/or Phe at position 421, according to the EU numbering scheme.

[0269] In some embodiments, the modified Fc polypeptide has at least 70% identity, at least 75% identity, at least 80% identity, at least 85% identity, at least 90% identity, or at least 95% identity to amino acids 111-217 of any one of SEQ ID NOS:4-90, 93-96, and 101-104 (e.g., SEQ ID NOS:34-38, 58, and 60-90). In some embodiments, the modified Fc polypeptide has at least 70% identity, at least 75% identity, at least 80% identity, at least 85% identity, at least 90% identity, or at least 95% identity to any one of SEQ ID NOS:4-90, 93-96, and 101-104 (e.g., SEQ ID NOS:34-38, 58, and 60-90). In some embodiments, the modified Fc polypeptide comprises the amino acids at EU index positions 384-390 and/or 413-421 of any one of SEQ ID NOS:4-90, 93-96, and 101-104 (e.g., SEQ ID NOS:34-38, 58, and 60-90). In some embodiments, the modified Fc polypeptide comprises the amino acids at EU index positions 380-390 and/or 413-421 of any one of 4-90, 93-96, and 101-104 (e.g., SEQ ID NOS:34-38, 58, and 60-90). In some embodiments, the modified Fc polypeptide comprises the amino acids at EU index positions 380-392 and/or 413-426 of any one of SEQ ID NOS:4-90, 93-96, and 101-104 (e.g., SEQ ID NOS:34-38, 58, and 60-90).

[0270] In some embodiments, the modified Fc polypeptide has at least 75% identity, at least 80% identity, at least 85% identity, at least 90% identity, or at least 95% identity to any one of SEQ ID NOS:4-90, 93-96, and 101-104 (e.g., SEQ ID NOS:34-38, 58, and 60-90), and further comprises at least five, six, seven, eight, nine, ten, eleven, twelve, thirteen, fourteen, fifteen, or sixteen of the positions, numbered according to the EU index, as follows: Trp, Tyr, Leu, Gln, or Glu at position 380; Leu, Tyr, Met, or Val at position 384; Leu, Thr, His, or Pro at position 386; Val, Pro, or an acidic amino acid at position 387; an aromatic amino acid, e.g., Trp, at position 388; Val, Ser, or Ala at position 389; Ser or Asn at position 390; Ser, Thr, Gln, or Phe at position 391; Gln, Phe, or His at position 392; an acidic amino acid, Ala, Ser, Leu, Thr, or Pro at position 413; Lys, Arg, Gly or Pro at position 414; Glu or Ser at position 415; Thr or an acidic amino acid at position 416; Trp, Tyr, His or Phe at position 421; Ser, Thr, Glu or Lys at position 424; and Ser, Trp, or Gly at position 426.

[0271] In some embodiments, the modified Fc polypeptide comprises the amino acid sequence of any one of SEQ ID NOS:34-38, 58, and 60-90. In other embodiments, the modified Fc polypeptide comprises the amino acid sequence of any one of SEQ ID NOS:34-38, 58, and 60-90, but in which one, two, or three amino acids are substituted.

[0272] In some embodiments, the modified Fc polypeptide comprises additional mutations such as the mutations described in Section VII below, including, but not limited to, a knob mutation (e.g., T366W as numbered with reference to EU numbering), hole mutations (e.g., T366S, L368A, and Y407V as numbered with reference to EU numbering), mutations that modulate effector function (e.g., L234A, L235A, and/or P329G (e.g., L234A and L235A) as numbered with reference to EU numbering), and/or mutations that increase serum stability (e.g., M252Y, S254T, and T256E as numbered with reference to EU numbering). By way of illustration, SEQ ID NOS:136-210 provide non-limiting examples of modified Fc polypeptides with mutations in the CH3 domain (e.g., clones CH3C.35.21.17, CH3C.35.20.1, CH3C.35.23.2, CH3C.35.23.3, CH3C.35.23.4, CH3C.35.21.17.2, and CH3C.35.23) comprising one or more of these additional mutations.

[0273] In some embodiments, the modified Fc polypeptide comprises a knob mutation (e.g., T366W as numbered with reference to EU numbering) and has at least 85% identity, at least 90% identity, or at least 95% identity to the sequence of any one of SEQ ID NOS:136, 137, 149, 161, 173, 185, and 197. In some embodiments, the modified Fc polypeptide comprises the sequence of any one of SEQ ID NOS:136, 137, 149, 161, 173, 185, and 197. In some embodiments, the modified Fc polypeptide comprises the sequence of SEQ ID NO:136.

[0274] In some embodiments, the modified Fc polypeptide comprises a knob mutation (e.g., T366W as numbered with reference to EU numbering) and mutations that modulate effector function (e.g., L234A, L235A, and/or P329G (e.g., L234A and L235A) as numbered with reference to EU numbering), and has at least 85% identity, at least 90% identity, or at least 95% identity to the sequence of any one of SEQ ID NOS:138, 139, 150, 151, 162, 163, 174, 175, 186, 187, 198, 199, 209, and 210. In some embodiments, the modified Fc polypeptide comprises the sequence of any one of SEQ ID NOS:138, 139, 150, 151, 162, 163, 174, 175, 186, 187, 198, and 199. In some embodiments, the modified Fc polypeptide comprises the sequence of SEQ ID NO:150.

[0275] In some embodiments, the modified Fc polypeptide comprises a knob mutation (e.g., T366W as numbered with reference to EU numbering) and mutations that increase serum stability (e.g., M252Y, S254T, and T256E as numbered with reference to EU numbering), and has at least 85% identity, at least 90% identity, or at least 95% identity to the sequence of any one of SEQ ID NOS:140, 152, 164, 176, 188, and 200. In some embodiments, the modified Fc polypeptide comprises the sequence of any one of SEQ ID NOS: 140, 152, 164, 176, 188, and 200.

[0276] In some embodiments, the modified Fc polypeptide comprises a knob mutation (e.g., T366W as numbered with reference to EU numbering), mutations that modulate effector function (e.g., L234A, L235A, and/or P329G (e.g., L234A and L235A) as numbered with reference to EU numbering), and mutations that increase serum stability (e.g., M252Y, S254T, and T256E as numbered with reference to EU numbering), and has at least 85% identity, at least 90% identity, or at least 95% identity to the sequence of any one of SEQ ID NOS:141, 142, 153, 154, 165, 166, 177, 178, 189, 190, 201, and 202. In some embodiments, the modified Fc polypeptide comprises the sequence of any one of SEQ ID NOS:141, 142, 153, 154, 165, 166, 177, 178, 189, 190, 201, and 202.

[0277] In some embodiments, the modified Fc polypeptide comprises hole mutations (e.g., T366S, L368A, and Y407V as numbered with reference to EU numbering) and has at least 85% identity, at least 90% identity, or at least 95% identity to the sequence of any one of SEQ ID NOS:143, 155, 167, 179, 191, and 203. In some embodiments, the modified Fc polypeptide comprises the sequence of any one of SEQ ID NOS:143, 155, 167, 179, 191, and 203.

[0278] In some embodiments, the modified Fc polypeptide comprises hole mutations (e.g., T366S, L368A, and Y407V as numbered with reference to EU numbering) and mutations that modulate effector function (e.g., L234A, L235A, and/or P329G (e.g., L234A and L235A) as numbered with reference to EU numbering), and has at least 85% identity, at least 90% identity, or at least 95% identity to the sequence of any one of SEQ ID NOS:144, 145, 156, 157, 168, 169, 180, 181, 192, 193, 204, and 205. In some embodiments, the modified Fc polypeptide comprises the sequence of any one of SEQ ID NOS:144, 145, 156, 157, 168, 169, 180, 181, 192, 193, 204, and 205.

[0279] In some embodiments, the modified Fc polypeptide comprises hole mutations (e.g., T366S, L368A, and Y407V as numbered with reference to EU numbering) and mutations that increase serum stability (e.g., M252Y, S254T, and T256E as numbered with reference to EU numbering), and has at least 85% identity, at least 90% identity, or at least 95% identity to the sequence of any one of SEQ ID NOS:146, 158, 170, 182, 194, and 206. In some embodiments, the modified Fc polypeptide comprises the sequence of any one of SEQ ID NOS:146, 158, 170, 182, 194, and 206.

[0280] In some embodiments, the modified Fc polypeptide comprises hole mutations (e.g., T366S, L368A, and Y407V as numbered with reference to EU numbering), mutations that modulate effector function (e.g., L234A, L235A, and/or P329G (e.g., L234A and L235A) as numbered with reference to EU numbering), and mutations that increase serum stability (e.g., M252Y, S254T, and T256E as numbered with reference to EU numbering), and has at least 85% identity, at least 90% identity, or at least 95% identity to the sequence of any one of SEQ ID NOS:147, 148, 159, 160, 171, 172, 183, 184, 195, 196, 207, and 208. In some embodiments, the modified Fc polypeptide comprises the sequence of any one of SEQ ID NOS:147, 148, 159, 160, 171, 172, 183, 184, 195, 196, 207, and 208.

[0281] In some embodiments, a modified Fc polypeptide that specifically binds to TfR comprises at least two, three, four, five, six, seven, or eight substitutions at positions 345, 346, 347, 349, 437, 438, 439, and 440, according to the EU numbering scheme. Illustrative modified Fc polypeptides are provided in SEQ ID NOS: 111-115. In some embodiments, the modified Fc polypeptide comprises Gly at position 437; Phe at position 438; and/or Asp at position 440. In some embodiments, Glu is present at position 440. In certain embodiments, the modified Fc polypeptide comprises at least one substitution at a position as follows: Phe or Ile at position 345; Asp, Glu, Gly, Ala, or Lys at position 346; Tyr, Met, Leu, Ile, or Asp at position 347; Thr or Ala at position 349; Gly at position 437; Phe at position 438; His Tyr, Ser, or Phe at position 439; or Asp at position 440. In some embodiments, two, three, four, five, six, seven, or all eight of positions 345, 346, 347, 349, 437, 438, 439, and 440 and have a substitution as specified in this paragraph. In some embodiments, the modified Fc polypeptide may comprise a conservative substitution, e.g., an amino acid in the same charge grouping, hydrophobicity grouping, side chain ring structure grouping (e.g., aromatic amino acids), or size grouping, and/or polar or non-polar grouping, of a specified amino acid at one or more of the positions in the set.

[0282] In some embodiments, the modified Fc polypeptide has at least 70% identity, at least 75% identity, at least 80% identity, at least 85% identity, at least 90% identity, or at least 95% identity to amino acids 111-217 of any one of SEQ ID NOS:111-115. In some embodiments, the modified Fc polypeptide has at least 70% identity, at least 75% identity, at least 80% identity, at least 85% identity, at least 90% identity, or at least 95% identity to SEQ ID NOS: 111-115. In some embodiments, the modified Fc polypeptide comprises the amino acid sequence of any one of SEQ ID NOS: 111-115. In other embodiments, the modified Fc polypeptide comprises the amino acid sequence of any one of SEQ ID NOS:111-115, but in which one, two, or three amino acids are substituted.

### TfR-Binding Fc Polypeptides Comprising Mutations in the CH2 Domain

[0283] In some embodiments, a modified Fc polypeptide that specifically binds to TfR comprises substitutions in a CH2 domain. In some embodiments, a modified Fc polypeptide comprises a human Ig CH2 domain, such as an IgG CH2 domain, that is modified for TfR-binding activity. The CH2 domain can be of any IgG subtype, i.e., from IgG1, IgG2, IgG3, or IgG4. In the context of IgG antibodies, a CH2 domain refers to the segment of amino acids from about position 231 to about position 340 as numbered according to the EU numbering scheme.

[0284] In some embodiments, a modified Fc polypeptide that specifically binds to TfR binds to the apical domain of TfR and may bind to TfR without blocking or otherwise inhibiting binding of transferrin to TfR. In some embodiments, binding of transferrin to TfR is not substantially inhibited. In some embodiments, binding of transferrin to TfR is inhibited by less than about 50% (e.g., less than about 45%, 40%, 35%, 30%, 25%, 20%, 15%, 10%, or 5%). In some embodiments, binding of transferrin to TfR is inhibited by less than about 20% (e.g., less than about 19%, 18%, 17%, 16%, 15%, 14%, 13%, 12%, 11%, 10%, 9%, 8%, 7%, 6%, 5%, 4%, 3%, 2% a, or 1%).

[0285] In some embodiments, a modified Fc polypeptide that specifically binds to TfR comprises at least two, three, four, five, six, seven, eight, or nine substitutions at positions 274, 276, 283, 285, 286, 287, 288, and 290, according to the EU numbering scheme. Illustrative modified Fc polypeptides are provided in SEQ ID NOS:116-120. In some embodiments, the modified Fc polypeptide comprises Glu at position 287 and/or Trp at position 288. In some embodiments, the modified Fc polypeptide comprises at least one substitution at a position as follows: Glu, Gly, Gln, Ser, Ala, Asn, Tyr, or Trp at position 274; Ile, Val, Asp, Glu, Thr, Ala, or Tyr at position 276; Asp, Pro, Met, Leu, Ala, Asn, or Phe at position 283; Arg, Ser, Ala, or Gly at position 285; Tyr, Trp, Arg, or Val at position 286; Glu at position 287; Trp or Tyr at position 288; Gln, Tyr, His, lie, Phe, Val, or Asp at position 289; or Leu, Trp, Arg, Asn, Tyr, or Val at position 290. In some embodiments, two, three, four, five, six, seven, eight, or all nine of positions 274, 276, 283, 285, 286, 287, 288, and 290 have a substitution as specified in this paragraph. In some embodiments, the modified Fc polypeptide may comprise a conservative substitution, e.g., an amino acid in the same charge grouping, hydrophobicity grouping, side chain ring structure grouping (e.g., aromatic amino acids), or size grouping, and/or polar or non-polar grouping, of a specified amino acid at one or more of the positions in the set.

[0286] In some embodiments, the modified Fc polypeptide comprises Glu, Gly, Gln, Ser, Ala, Asn, or Tyr at position 274; Ile, Val, Asp, Glu, Thr, Ala, or Tyr at position 276 Asp, Pro, Met, Leu, Ala, or Asn at position 283; Arg, Ser, or Ala at position 285; Tyr, Trp, Arg, or Val at position 286; Glu at position 287; Trp at position 288; Gln, Tyr, His, Ile, Phe, or Val at position 289; and/or Leu, Trp, Arg, Asn, or Tyr at position 290. In some embodiments, the modified Fc polypeptide comprises Arg at position 285; Tyr or Trp at position 286; Glu at position 287; Trp at position 288; and/or Arg or Trp at position 290.

[0287] In some embodiments, the modified Fc polypeptide has at least 70% identity, at least 75% identity, at least 80% identity, at least 85% identity, at least 90% identity, or at least 95% identity to amino acids 1-110 of any one of SEQ ID NOS:116-120. In some embodiments, the modified Fc polypeptide has at least 70% identity, at least 75% identity, at least 80% identity, at least 85% identity, at least 90% identity, or at least 95% identity to SEQ ID NOS:116-120. In some embodiments, the modified Fc polypeptide comprises the amino acid sequence of any one of SEQ ID NOS:116-120. In other embodiments, the modified Fc polypeptide comprises the amino acid sequence of any one of SEQ ID NOS: 116-120, but in which one, two, or three amino acids are substituted.

[0288] In some embodiments, a modified Fc polypeptide that specifically binds to TfR comprises at least two, three, four, five, six, seven, eight, nine, or ten substitutions at positions 266, 267, 268, 269, 270, 271, 295, 297, 298, and 299, according to the EU numbering scheme. Illustrative modified Fc polypeptides are provided in SEQ ID NOS:121-125. In some embodiments, the modified Fc polypeptide comprises Pro at position 270, Glu at position 295, and/or Tyr at position 297. In some embodiments, the modified Fc polypeptide comprises at least one substitution at a position as follows: Pro, Phe, Ala, Met, or Asp at position 266; Gln, Pro, Arg, Lys, Ala, Ile, Leu, Glu, Asp, or Tyr at position 267; Thr, Ser, Gly, Met, Val, Phe, Trp, or Leu at position 268; Pro, Val, Ala, Thr, or Asp at position 269; Pro, Val, or Phe at position 270; Trp, Gln, Thr, or Glu at position 271; Glu, Val, Thr, Leu, or Trp at position 295; Tyr, His, Val, or Asp at position 297; Thr, His, Gln, Arg, Asn, or Val at position 298; or Tyr, Asn, Asp, Ser, or Pro at position 299. In some embodiments, two, three, four, five, six, seven, eight, nine, or all ten of positions 266, 267, 268, 269, 270, 271, 295, 297, 298, and 299 have a substitution as specified in this paragraph. In some embodiments, a modified Fc polypeptide may comprise a conservative substitution, e.g., an amino acid in the same charge grouping, hydrophobicity grouping, side chain ring structure grouping (e.g., aromatic amino acids), or size grouping, and/or polar or non-polar grouping, of a specified amino acid at one or more of the positions in the set.

[0289] In some embodiments, the modified Fc polypeptide comprises Pro, Phe, or Ala at position 266; Gln, Pro, Arg, Lys, Ala, or Ile at position 267; Thr, Ser, Gly, Met, Val, Phe, or Trp at position 268; Pro, Val, or Ala at position 269; Pro at position 270; Trp or Gln at position 271; Glu at position 295; Tyr at position 297; Thr, His, or Gln at position 298; and/or Tyr, Asn, Asp, or Ser at position 299.

[0290] In some embodiments, the modified Fc polypeptide comprises Met at position 266; Leu or Glu at position 267; Trp at position 268; Pro at position 269; Val at position 270; Thr at position 271; Val or Thr at position 295; His at position 197; His, Arg, or Asn at position 198; and/or Pro at position 299.

[0291] In some embodiments, the modified Fc polypeptide comprises Asp at position 266; Asp at position 267; Leu at position 268; Thr at position 269; Phe at position 270; Gln at position 271; Val or Leu at position 295; Val at position 297; Thr at position 298; and/or Pro at position 299.

[0292] In some embodiments, the modified Fc polypeptide has at least 70% identity, at least 75% identity, at least 80% identity, at least 85% identity, at least 90% identity, or at least 95% identity to amino acids 1-110 of any one of SEQ ID NOS:121-125. In some embodiments, the modified Fc polypeptide has at least 70% identity, at least 75% identity, at least 80% identity, at least 85% identity, at least 90% identity, or at least 95% identity to SEQ ID NOS:121-125. In some embodiments, the modified Fc polypeptide comprises the amino acid sequence of any one of SEQ ID NOS:121-125. In other embodiments, the modified Fc polypeptide comprises the amino acid sequence of any one of SEQ ID NOS:121-125, but in which one, two, or three amino acids are substituted.

[0293] In some embodiments, a modified Fc polypeptide that specifically binds to TfR comprises at least two, three, four, five, six, seven, eight, nine, or ten substitutions at positions 268, 269, 270, 271, 272, 292, 293, 294, and 300, according to the EU numbering scheme. Illustrative modified Fc polypeptides are provided in SEQ ID NOS:126-130. In some embodiments, the modified Fc polypeptide comprises at least one substitution at a position as follows: Val or Asp at position 268; Pro, Met, or Asp at position 269; Pro or Trp at position 270; Arg, Trp, Glu, or Thr at position 271; Met, Tyr, or Trp at position 272; Leu or Trp at position 292; Thr, Val, Ile, or Lys at position 293; Ser, Lys, Ala, or Leu at position 294; His, Leu, or Pro at position 296; or Val or Trp at position 300. In some embodiments, two, three, four, five, six, seven, eight, nine, or all ten of positions 268, 269, 270, 271, 272, 292, 293, 294, and 300 have a substitution as specified in this paragraph. In some embodiments, the modified Fc polypeptide may comprise a conservative substitution, e.g., an amino acid in the same charge grouping, hydrophobicity grouping, side chain ring structure grouping (e.g., aromatic amino acids), or size grouping, and/or polar or non-polar grouping, of a specified amino acid at one or more of the positions in the set.

[0294] In some embodiments, the modified Fc polypeptide comprises Val at position 268; Pro at position 269; Pro at position 270; Arg or Trp at position 271; Met at position 272; Leu at position 292; Thr at position 293; Ser at position 294; His at position 296; and/or Val at position 300.

[0295] In some embodiments, the modified Fc polypeptide comprises Asp at position 268; Met or Asp at position 269; Trp at position 270; Glu or Thr at position 271; Tyr or Trp at position 272; Trp at position 292; Val, Ile, or Lys at position 293; Lys, Ala, or Leu at position 294; Leu or Pro at position 296; and/or Trp at position 300.

[0296] In some embodiments, the modified Fc polypeptide has at least 70% identity, at least 75% identity, at least 80% identity, at least 85% identity, at least 90% identity, or at least 95% identity to amino acids 1-110 of any one of SEQ ID NOS:126-130. In some embodiments, the modified Fc polypeptide has at least 70% identity, at least 75% identity, at least 80% identity, at least 85% identity, at least 90% identity, or at least 95% identity to SEQ ID NOS:126-130. In some embodiments, the modified Fc polypeptide comprises the amino acid sequence of any one of SEQ ID NOS:126-130. In other embodiments, the modified Fc polypeptide comprises the amino acid sequence of any one of SEQ ID NOS:126-130, but in which one, two, or three amino acids are substituted.

[0297] In some embodiments, a modified Fc polypeptide that specifically binds to TfR has at least two, three, four, five, six, seven, eight, nine, or ten substitutions at positions 272, 274, 276, 322, 324, 326, 329, 330, and 331, according to the EU numbering scheme. Illustrative modified Fc polypeptides are provided in SEQ ID NOS:131-135. In some embodiments, the modified Fc polypeptide comprises Trp at position 330. In some embodiments, the modified Fc polypeptide comprises at least one substitution at a position as follows: Trp, Val, lie, or Ala at position 272; Trp or Gly at position 274; Tyr, Arg, or Glu at position 276; Ser, Arg, or Gln at position 322; Val, Ser, or Phe at position 324; Ile, Ser, or Trp at position 326; Trp, Thr, Ser, Arg, or Asp at position 329; Tip at position 330; or Ser, Lys, Arg, or Val at position 331. In some embodiments, two, three, four, five, six, seven, eight, or all nine of positions 272, 274, 276, 322, 324, 326, 329, 330, and 331 have a substitution as specified in this paragraph. In some embodiments, the modified Fc polypeptide may comprise a conservative substitution, e.g., an amino acid in the same charge grouping, hydrophobicity grouping, side chain ring structure grouping (e.g., aromatic amino acids), or size grouping, and/or polar or non-polar grouping, of a specified amino acid at one or more of the positions in the set.

[0298] In some embodiments, the modified Fc polypeptide comprises two, three, four, five, six, seven, eight, or nine positions selected from the following: position 272 is Trp, Val, Ile, or Ala; position 274 is Trp or Gly; position 276 is Tyr, Arg, or Glu; position 322 is Ser, Arg, or Gln; position 324 is Val, Ser, or Phe; position 326 is lie, Ser, or Trp; position 329 is Trp, Thr, Ser, Arg, or Asp; position 330 is Trp; and position 331 is Ser, Lys, Arg, or Val. In some embodiments, the modified Fc polypeptide comprises Val or Ile at position 272; Gly at position 274; Arg at position 276; Arg at position 322; Ser at position 324; Ser at position 326; Thr, Ser, or Arg at position 329; Trp at position 330; and/or Lys or Arg at position 331.

[0299] In some embodiments, the modified Fc polypeptide has at least 70% identity, at least 75% identity, at least 80% identity, at least 85% identity, at least 90% identity, or at least 95% identity to amino acids 1-110 of any one of SEQ ID NOS:131-135. In some embodiments, the modified Fc polypeptide has at least 70% identity, at least 75% identity, at least 80% identity, at least 85% identity, at least 90% identity, or at least 95% identity to SEQ ID NOS:131-135. In some embodiments, the modified Fc polypeptide comprises the amino acid sequence of any one of SEQ ID NOS:131-135. In other embodiments, the modified Fc polypeptide comprises the amino acid sequence of any one of SEQ ID NOS:131-135, but in which one, two, or three amino acids are substituted.

### VII. Additional Fc Polypeptide Mutations

[0300] In some aspects, a fusion protein described herein comprises two Fc polypeptides that may each comprise independently selected modifications or may be a wild-type Fc polypeptide, e.g., a human IgG1 Fc polypeptide. In some embodiments, one or both Fc polypeptides contains one or more modifications that confer binding to a blood-brain barrier (BBB) receptor, e.g., transferrin receptor (TfR). Non-limiting examples of other mutations that can be introduced into one or both Fc polypeptides include, e.g., mutations to increase serum stability, to modulate effector function, to influence glycosylation, to reduce immunogenicity in humans, and/or to provide for knob and hole heterodimerization of the Fc polypeptides.

[0301] In some embodiments, the Fc polypeptides present in the fusion protein independently have an amino acid sequence identity of at least about 75%, 76%, 77%, 78%, 79%, 80%, 81%, 82%, 83%, 84%, 85%, 86%, 87%, 88%, 89%, 90%, 91%, 92%, 93%, 94%, 95%, 96%, 97%, 98%, or 99% to a corresponding wild-type Fc polypeptide (e.g., a human IgG1, IgG2, IgG3, or IgG4 Fc polypeptide).

[0302] In some embodiments, the Fc polypeptides present in the fusion protein include knob and hole mutations to promote heterodimer formation and hinder homodimer formation. Generally, the modifications introduce a protuberance (“knob”) at the interface of a first polypeptide and a corresponding cavity (“hole”) in the interface of a second polypeptide, such that the protuberance can be positioned in the cavity so as to promote heterodimer formation and thus hinder homodimer formation. Protuberances are constructed by replacing small amino acid side chains from the interface of the first polypeptide with larger side chains (e.g., tyrosine or tryptophan). Compensatory cavities of identical or similar size to the protuberances are created in the interface of the second polypeptide by replacing large amino acid side chains with smaller ones (e.g., alanine or threonine). In some embodiments, such additional mutations are at a position in the Fc polypeptide that does not have a negative effect on binding of the polypeptide to a BBB receptor, e.g., TfR.

[0303] In one illustrative embodiment of a knob and hole approach for dimerization, position 366 (numbered according to the EU numbering scheme) of one of the Fc polypeptides present in the fusion protein comprises a tryptophan in place of a native threonine. The other Fc polypeptide in the dimer has a valine at position 407 (numbered according to the EU numbering scheme) in place of the native tyrosine. The other Fc polypeptide may further comprise a substitution in which the native threonine at position 366 (numbered according to the EU numbering scheme) is substituted with a serine and a native leucine at position 368 (numbered according to the EU numbering scheme) is substituted with an alanine. Thus, one of the Fc polypeptides of a fusion protein described herein has the T366W knob mutation and the other Fc polypeptide has the Y407V mutation, which is typically accompanied by the T366S and L368A hole mutations.

[0304] In some embodiments, modifications to enhance serum half-life may be introduced. For example, in some embodiments, one or both Fc polypeptides present in a fusion protein described herein may comprise a tyrosine at position 252, a threonine at position 254, and a glutamic acid at position 256, as numbered according to the EU numbering scheme. Thus, one or both Fc polypeptides may have M252Y, S254T, and T256E substitutions. Alternatively, one or both Fc polypeptides may have M428L and N434S substitutions, as numbered according to the EU numbering scheme. Alternatively, one or both Fc polypeptides may have an N434S or N434A substitution.

[0305] In some embodiments, one or both Fc polypeptides present in a fusion protein described herein may comprise modifications that reduce effector function, i.e., having a reduced ability to induce certain biological functions upon binding to an Fc receptor expressed on an effector cell that mediates the effector function. Examples of antibody effector functions include, but are not limited to, C1q binding and complement dependent cytotoxicity (CDC), Fc receptor binding, antibody-dependent cell-mediated cytotoxicity (ADCC), antibody-dependent cell-mediated phagocytosis (ADCP), down-regulation of cell surface receptors (e.g., B cell receptor), and B-cell activation. Effector functions may vary with the antibody class. For example, native human IgG1 and IgG3 antibodies can elicit ADCC and CDC activities upon binding to an appropriate Fc receptor present on an immune system cell; and native human IgG1, IgG2, IgG3, and IgG4 can elicit ADCP functions upon binding to the appropriate Fc receptor present on an immune cell.

[0306] In some embodiments, one or both Fc polypeptides present in a fusion protein described herein may also be engineered to contain other modifications for heterodimerization, e.g., electrostatic engineering of contact residues within a CH3-CH3 interface that are naturally charged or hydrophobic patch modifications.

[0307] In some embodiments, one or both Fc polypeptides present in a fusion protein described herein may include additional modifications that modulate effector function.

[0308] In some embodiments, one or both Fc polypeptides present in a fusion protein described herein may comprise modifications that reduce or eliminate effector function. Illustrative Fc polypeptide mutations that reduce effector function include, but are not limited to, substitutions in a CH2 domain, e.g., at positions 234 and 235, according to the EU numbering scheme. For example, in some embodiments, one or both Fc polypeptides can comprise alanine residues at positions 234 and 235. Thus, one or both Fc polypeptides may have L234A and L235A (LALA) substitutions.

[0309] Additional Fc polypeptide mutations that modulate an effector function include, but are not limited to, the following: position 329 may have a mutation in which proline is substituted with a glycine or arginine or an amino acid residue large enough to destroy the Fc/Fcγ receptor interface that is formed between proline 329 of the Fc and tryptophan residues Trp 87 and Trp 110 of FcγRIII. Additional illustrative substitutions include S228P, E233P, L235E, N297A, N297D, and P331S, according to the EU numbering scheme. Multiple substitutions may also be present, e.g., L234A and L235A of a human IgG1 Fc region; L234A, L235A, and P329G of a human IgG1 Fc region; S228P and L235E of a human IgG4 Fc region; L234A and G237A of a human IgG1 Fc region; L234A, L235A, and G237A of a human IgG1 Fc region; V234A and G237A of a human IgG2 Fc region; L235A, G237A, and E318A of a human IgG4 Fc region; and S228P and L236E of a human IgG4 Fc region, according to the EU numbering scheme. In some embodiments, one or both Fc polypeptides may have one or more amino acid substitutions that modulate ADCC, e.g., substitutions at positions 298, 333, and/or 334, according to the EU numbering scheme.

### Illustrative Fc Polypeptides Comprising Additional Mutations

[0310] By way of non-limiting example, one or both Fc polypeptides present in a fusion protein described herein may comprise additional mutations including a knob mutation (e.g., T366W as numbered according to the EU numbering scheme), hole mutations (e.g., T366S, L368A, and Y407V as numbered according to the EU numbering scheme), mutations that modulate effector function (e.g., L234A, L235A, and/or P329G (e.g., L234A and L235A) as numbered according to the EU numbering scheme), and/or mutations that increase serum stability (e.g., M252Y, S254T, and T256E as numbered according to the EU numbering scheme).

[0311] In some embodiments, an Fc polypeptide may have a knob mutation (e.g., T366W as numbered according to the EU numbering scheme) and at least 85% identity, at least 90% identity, or at least 95% identity to the sequence of any one of SEQ ID NOS:1, 4-90, and 111-135. In some embodiments, an Fc polypeptide having the sequence of any one of SEQ ID NOS:1, 4-90, and 111-135 may be modified to have a knob mutation.

[0312] In some embodiments, an Fc polypeptide may have a knob mutation (e.g., T366W as numbered according to the EU numbering scheme), mutations that modulate effector function (e.g., L234A, L235A, and/or P329G (e.g., L234A and L235A) as numbered according to the EU numbering scheme), and at least 85% identity, at least 900% identity, or at least 95% identity to the sequence of any one of SEQ ID NOS:1, 4-90, and 111-135. In some embodiments, an Fc polypeptide having the sequence of any one of SEQ ID NOS:1, 4-90, and 111-135 may be modified to have a knob mutation and mutations that modulate effector function.

[0313] In some embodiments, an Fc polypeptide may have a knob mutation (e.g., T366W as numbered according to the EU numbering scheme), mutations that increase serum stability (e.g., M252Y, S254T, and T256E as numbered according to the EU numbering scheme), and at least 85% identity, at least 90% identity, or at least 95% identity to the sequence of any one of SEQ ID NOS:1, 4-90, and 111-135. In some embodiments, an Fc polypeptide having the sequence of any one of SEQ ID NOS:1, 4-90, and 111-135 may be modified to have a knob mutation and mutations that increase serum stability.

[0314] In some embodiments, an Fc polypeptide may have a knob mutation (e.g., T366W as numbered according to the EU numbering scheme), mutations that modulate effector function (e.g., L234A, L235A, and/or P329G (e.g., L234A and L235A) as numbered according to the EU numbering scheme), mutations that increase serum stability (e.g., M252Y, S254T, and T256E as numbered according to the EU numbering scheme), and at least 85% identity, at least 90% identity, or at least 95% identity to the sequence of any one of SEQ ID NOS:1, 4-90, and 111-135. In some embodiments, an Fc polypeptide having the sequence of any one of SEQ ID NOS:1, 4-90, and 111-135 may be modified to have a knob mutation, mutations that modulate effector function, and mutations that increase serum stability.

[0315] In some embodiments, an Fc polypeptide may have hole mutations (e.g., T366S, L368A, and Y407V as numbered according to the EU numbering scheme) and at least 85% identity, at least 90% identity, or at least 95% identity to the sequence of any one of SEQ ID NOS:1, 4-90, and 111-135. In some embodiments, an Fc polypeptide having the sequence of any one of SEQ ID NOS:1, 4-90, and 111-135 may be modified to have hole mutations.

[0316] In some embodiments, an Fc polypeptide may have hole mutations (e.g., T366S, L368A, and Y407V as numbered according to the EU numbering scheme), mutations that modulate effector function (e.g., L234A, L235A, and/or P329G (e.g., L234A and L235A) as numbered according to the EU numbering scheme), and at least 85% identity, at least 90% identity, or at least 95% identity to the sequence of any one of SEQ ID NOS:1, 4-90, and 111-135. In some embodiments, an Fc polypeptide having the sequence of any one of SEQ ID NOS:1, 4-90, and 111-135 may be modified to have hole mutations and mutations that modulate effector function.

[0317] In some embodiments, an Fc polypeptide may have hole mutations (e.g., T366S, L368A, and Y407V as numbered according to the EU numbering scheme), mutations that increase serum stability (e.g., M252Y, S254T, and T256E as numbered according to the EU numbering scheme), and at least 85% identity, at least 90% identity, or at least 95% identity to the sequence of any one of SEQ ID NOS:1, 4-90, and 111-135. In some embodiments, an Fc polypeptide having sequence of any one of SEQ ID NOS:1, 4-90, and 111-135 may be modified to have hole mutations and mutations that increase serum stability.

[0318] In some embodiments, an Fc polypeptide may have hole mutations (e.g., T366S, L368A, and Y407V as numbered according to the EU numbering scheme), mutations that modulate effector function (e.g., L234A, L235A, and/or P329G (e.g., L234A and L235A) as numbered according to the EU numbering scheme), mutations that increase serum stability (e.g., M252Y, S254T, and T256E as numbered according to the EU numbering scheme), and at least 85% identity, at least 90% identity, or at least 95% identity to the sequence of any one of SEQ ID NOS:1, 4-90, and 111-135. In some embodiments, an Fc polypeptide having the sequence of any one of SEQ ID NOS:1, 4-90, and 111-135 may be modified to have hole mutations, mutations that modulate effector function, and mutations that increase serum stability.

### VIII. Illustrative Fusion Proteins Comprising a Progranulin Polypeptide

[0319] In some aspects, a fusion protein described herein comprises a first Fc polypeptide that is linked to a progranulin polypeptide or a variant thereof; and a second Fc polypeptide that forms an Fc dimer with the first Fc polypeptide. In some embodiments, the first Fc polypeptide and/or the second Fc polypeptide does not include an immunoglobulin heavy and/or light chain variable region sequence or an antigen-binding portion thereof. In some embodiments, the first Fc polypeptide is a modified Fc polypeptide and/or the second Fc polypeptide is a modified Fc polypeptide. In some embodiments, the second Fc polypeptide is a modified Fc polypeptide. In some embodiments, the modified Fc polypeptide contains one or more modifications that promote its heterodimerization to the other Fc polypeptide. In some embodiments, the modified Fc polypeptide contains one or more modifications that reduce effector function. In some embodiments, the modified Fc polypeptide contains one or more modifications that extend serum half-life. In some embodiments, the modified Fc polypeptide contains one or more modifications that confer binding to a blood-brain barrier (BBB) receptor, e.g., transferrin receptor (TfR).

[0320] In other aspects, a fusion protein described herein comprises a first polypeptide chain that comprises a modified Fc polypeptide that specifically binds to a BBB receptor, e.g., TfR, and a second polypeptide chain that comprises an Fc polypeptide which dimerizes with the modified Fc polypeptide to form an Fc dimer. A progranulin polypeptide may be linked to either the first or the second polypeptide chain. In some embodiments, the progranulin polypeptide is linked to the second polypeptide chain. In some embodiments, the protein comprises two progranulin polypeptides, each linked to one of the polypeptide chains. In some embodiments, the Fc polypeptide may be a BBB receptor-binding polypeptide that specifically binds to the same BBB receptor as the modified Fc polypeptide in the first polypeptide chain. In some embodiments, the Fc polypeptide does not specifically bind to a BBB receptor.

[0321] In some embodiments, a fusion protein described herein comprises a first polypeptide chain comprising a modified Fc polypeptide that specifically binds to TfR and a second polypeptide chain that comprises an Fc polypeptide, wherein the modified Fc polypeptide and the Fc polypeptide dimerize to from an Fc dimer. In some embodiments, the progranulin polypeptide is linked to the first polypeptide chain. In some embodiments, the progranulin polypeptide is linked to the second polypeptide chain. In some embodiments, the Fc polypeptide does not specifically bind to a BBB receptor, e.g., TfR.

[0322] In some embodiments, a fusion protein described herein comprises a first polypeptide chain that comprises a modified Fc polypeptide that binds to TfR and comprises a T366W (knob) substitution; and a second polypeptide chain that comprises an Fc polypeptide comprising T366S, L368A, and Y407V (hole) substitutions. In some embodiments, the modified Fc polypeptide and/or the Fc polypeptide further comprises L234A and L235A (LALA) substitutions. In some embodiments, the modified Fc polypeptide and/or the Fc polypeptide further comprises M252Y, S254T, and T256E (YTE) substitutions. In some embodiments, the modified Fc polypeptide and/or the Fc polypeptide further comprises L234A and L235A (LALA) substitutions and M252Y, S254T, and T256E (YTE) substitutions. In some embodiments, the modified Fc polypeptide and/or the Fc polypeptide comprises human IgG1 wild-type residues at positions 234, 235, 252, 254, 256, and 366.

[0323] In some embodiments, the modified Fc polypeptide comprises the knob, LALA, and YTE mutations as specified for any one of SEQ ID NOS:93-96, 136, 137-142, 149-154, 161-166, 173-178, 185-190, and 197-202, and has at least 85% identity, at least 90% identity, or at least 95% identity to the respective sequence; or comprises the sequence of any one of SEQ ID NOS:93-96, 136, 137-142, 149-154, 161-166, 173-178, 185-190, and 197-202. In some embodiments, the Fc polypeptide comprises the hole, LALA, and YTE mutations as specified for any one of SEQ ID NOS:97-100 and has at least 85% identity, at least 90% identity, or at least 95% identity to the respective sequence; or comprises the sequence of any one of SEQ ID NOS:97-100. In some embodiments, the modified Fc polypeptide comprises any one of SEQ ID NOS:93-96, 136, 137-142, 149-154, 161-166, 173-178, 185-190, and 197-202, and the Fc polypeptide comprises any one of SEQ ID NOS:97-100. In some embodiments, the N-terminus of the modified Fc polypeptide and/or the Fc polypeptide includes a portion of an IgG1 hinge region (e.g., DKTHTCPPCP; SEQ ID NO:109). In some embodiments, the modified Fc polypeptide has at least 85%, at least 90%, or at least 95% identity to any one of SEQ ID NOS: 110, 209, and 210, or comprises the sequence of any one of SEQ ID NOS:110, 209, and 210.

[0324] In some embodiments, a fusion protein described herein comprises a first polypeptide chain that comprises a modified Fc polypeptide that binds to TfR and comprises T366S, L368A, and Y407V (hole) substitutions; and a second polypeptide chain that comprises an Fc polypeptide comprising a T366W (knob) substitution. In some embodiments, the modified Fc polypeptide and/or the Fc polypeptide further comprises L234A and L235A (LALA) substitutions. In some embodiments, the modified Fc polypeptide and/or the Fc polypeptide further comprises M252Y, S254T, and T256E (YTE) substitutions. In some embodiments, the modified Fc polypeptide and/or the Fc polypeptide further comprises L234A and L235A (LALA) substitutions and M252Y, S254T, and T256E (YTE) substitutions. In some embodiments, the modified Fc polypeptide and/or the Fc polypeptide comprises human IgG1 wild-type residues at positions 234, 235, 252, 254, 256, and 366.

[0325] In some embodiments, the modified Fc polypeptide comprises the hole, LALA, and YTE mutations as specified for any one of SEQ ID NOS:101-104, 143-148, 155-160, 167-172, 179-184, 191-196, and 203-208, and has at least 85% identity, at least 90% identity, or at least 95% identity to the respective sequence; or comprises the sequence of any one of SEQ ID NOS:101-104, 143-148, 155-160, 167-172, 179-184, 191-196, and 203-208. In some embodiments, the Fc polypeptide comprises the knob, LALA, and YTE mutations as specified for any one of SEQ ID NOS:105-108 and has at least 85% identity, at least 90% identity, or at least 95% identity to the respective sequence; or comprises the sequence of any one of SEQ ID NOS:105-108. In some embodiments, the modified Fc polypeptide comprises any one of SEQ ID NOS:101-104, 143-148, 155-160, 167-172, 179-184, 191-196, and 203-208, and the Fc polypeptide comprises any one of SEQ ID NOS:105-108. In some embodiments, the N-terminus of the modified Fc polypeptide and/or the Fc polypeptide includes a portion of an IgG1 hinge region (e.g., DKTHTCPPCP; SEQ ID NO: 109).

[0326] In some embodiments, a progranulin polypeptide present in a fusion protein described herein is linked to a polypeptide chain that comprises an Fc polypeptide having at least 85%, at least 90%, or at least 95% identity to any one of SEQ ID NOS:97-100, or comprises the sequence of any one of SEQ ID NOS:97-100 (e.g., as a fusion polypeptide). In some embodiments, the progranulin polypeptide is linked to the Fc polypeptide by a linker, such as a flexible linker, and/or a hinge region or portion thereof (e.g., DKTHTCPPCP; SEQ ID NO: 109). In some embodiments, the fusion protein comprises a modified Fc polypeptide having at least 85%, at least 90%, or at least 95% identity to any one of SEQ ID NOS:93-96, 136, 137-142, 149-154, 161-166, 173-178, 185-190, and 197-202, or comprises the sequence of any one of SEQ ID NOS:93-96, 136, 137-142, 149-154, 161-166, 173-178, 185-190, and 197-202. In some embodiments, the N-terminus of the Fc polypeptide and/or the modified Fc polypeptide includes a portion of an IgG1 hinge region (e.g., DKTHTCPPCP; SEQ ID NO:109). In some embodiments, the progranulin polypeptide comprises a sequence having greater than 90%, or at least 95% identity to SEQ ID NO:212, or comprises the sequence of SEQ ID NO:212. In some embodiments, the modified Fc polypeptide has at least 85%, at least 90%, or at least 95% identity to any one of SEQ ID NOS: 110, 209, and 210, or comprises the sequence of any one of SEQ ID NOS: 110, 209, and 210.

[0327] In some embodiments, a progranulin polypeptide present in a fusion protein described herein is linked to a polypeptide chain that comprises an Fc polypeptide having at least 85%, at least 90%, or at least 95% identity to any one of SEQ ID NOS:105-108, or comprises the sequence of any one of SEQ ID NOS:105-108 (e.g., as a fusion polypeptide). In some embodiments, the progranulin polypeptide is linked to the Fc polypeptide by a linker, such as a flexible linker, and/or a hinge region or portion thereof (e.g., DKTHTCPPCP; SEQ ID NO:109). In some embodiments, the progranulin polypeptide comprises a sequence having greater than 90%, or at least 95% identity to SEQ ID NO:212, or comprises the sequence of SEQ ID NO:212. In some embodiments, the fusion protein comprises a modified Fc polypeptide having at least 85%, at least 90%, or at least 95% identity to any one of SEQ ID NOS:101-104, 143-148, 155-160, 167-172, 179-184, 191-196, and 203-208, or comprises the sequence of any one of SEQ ID NOS:101-104, 143-148, 155-160, 167-172, 179-184, 191-196, and 203-208. In some embodiments, the N-terminus of the Fc polypeptide and/or the modified Fc polypeptide includes a portion of an IgG1 hinge region (e.g., DKTHTCPPCP; SEQ ID NO:109).

[0328] In some embodiments, a progranulin polypeptide present in a fusion protein described herein is linked to a polypeptide chain that comprises a modified Fc polypeptide having at least 85%, at least 90%, or at least 95% identity to any one of SEQ ID NOS:93-96, 136, 137-142, 149-154, 161-166, 173-178, 185-190, and 197-202, or comprises the sequence of any one of SEQ ID NOS:93-96, 136, 137-142, 149-154, 161-166, 173-178, 185-190, and 197-202 (e.g., as a fusion polypeptide). In some embodiments, the progranulin polypeptide is linked to the modified Fc polypeptide by a linker, such as a flexible linker, and/or a hinge region or portion thereof (e.g., DKTHTCPPCP; SEQ ID NO:109). In some embodiments, the progranulin polypeptide comprises a sequence having greater than 90%, or at least 95% identity to SEQ ID NO:212, or comprises the sequence of SEQ ID NO:212. In some embodiments, the fusion protein comprises an Fc polypeptide having at least 85%, at least 90%, or at least 95% identity to any one of SEQ ID NOS:97-100, 149 and 150, or comprises the sequence of any one of SEQ ID NOS:97-100, 149 and 150. In some embodiments, the N-terminus of the modified Fc polypeptide and/or the Fc polypeptide includes a portion of an IgG1 hinge region (e.g., DKTHTCPPCP; SEQ ID NO:109).

[0329] In some embodiments, a progranulin polypeptide present in a fusion protein described herein is linked to a polypeptide chain that comprises a modified Fc polypeptide having at least 85%, at least 90%, or at least 95% identity to any one of SEQ ID NOS:101-104, 143-148, 155-160, 167-172, 179-184, 191-196, and 203-208, or comprises the sequence of any one of SEQ ID NOS:101-104, 143-148, 155-160, 167-172, 179-184, 191-196, and 203-208 (e.g., as a fusion polypeptide). In some embodiments, the progranulin polypeptide is linked to the modified Fc polypeptide by a linker, such as a flexible linker, and/or a hinge region or portion thereof (e.g., DKTHTCPPCP; SEQ ID NO:109). In some embodiments, the progranulin polypeptide comprises a sequence having greater than 90%, or at least 95% identity to SEQ ID NO:212, or comprises the sequence of SEQ ID NO:212. In some embodiments, the fusion protein comprises an Fc polypeptide having at least 85%, at least 90%, or at least 95% identity to any one of SEQ ID NOS:105-108, or comprises the sequence of any one of SEQ ID NOS:105-108. In some embodiments, the N-terminus of the modified Fc polypeptide and/or the Fc polypeptide includes a portion of an IgG1 hinge region (e.g., DKTHTCPPCP; SEQ ID NO:109).

### Fc Dimer:PGRN Fusion Proteins

[0330] In one embodiment, an Fc dimer:PGRN fusion protein comprises: (a) a first Fc polypeptide linked to a progranulin polypeptide directly or through a polypeptide linker (e.g., GGGGSGGGGS (SEQ ID NO:276) or GGGGS (SEQ ID NO:277)), wherein the first Fc polypeptide comprises hole mutations T366S, L368A, and Y407V, according to EU numbering scheme, and (b) a second Fc polypeptide comprising knob mutation T366W, according to EU numbering scheme. In some embodiments, the C-terminus of the progranulin polypeptide is linked to the N-terminus of the first Fc polypeptide directly or through a polypeptide linker. In some embodiments, the N-terminus of the progranulin polypeptide is linked to the C-terminus of the first Fc polypeptide directly or through a polypeptide linker. In some embodiments, the first and/or second Fc polypeptide may further be linked to an IgG1 hinge region or a portion thereof (e.g., SEQ ID NO: 91 or 109). In some embodiments, (a) comprises a sequence that has at least 85% identity, at least 90% identity, at least 95% identity, or 100% identity to the sequence of SEQ ID NO:213, 214, 225, or 226, and (b) comprises a sequence that has at least 85% identity, at least 90% identity, at least 95% identity, or 100% identity to the sequence of SEQ ID NO:261.

[0331] In one embodiment, an Fc dimer:PGRN fusion protein comprises: (a) a first Fc polypeptide linked to a progranulin polypeptide directly or through a polypeptide linker (e.g., GGGGSGGGGS (SEQ ID NO:276) or GGGGS (SEQ ID NO:277)), wherein the first Fc polypeptide comprises hole mutations T366S, L368A, and Y407V and L234A and L235A (LALA) mutations, according to EU numbering scheme, and (b) a second Fc polypeptide comprising knob mutation T366W, according to EU numbering scheme. In some embodiments, the C-terminus of the progranulin polypeptide is linked to the N-terminus of the first Fc polypeptide directly or through a polypeptide linker. In some embodiments, the N-terminus of the progranulin polypeptide is linked to the C-terminus of the first Fc polypeptide directly or through a polypeptide linker. In some embodiments, the first and/or second Fc polypeptide may further be linked to an IgG1 hinge region or a portion thereof (e.g., SEQ ID NO: 91 or 109). In some embodiments, (a) comprises a sequence that has at least 85% identity, at least 90% identity, at least 95% identity, or 100% identity to the sequence of SEQ ID NO:215, 216, 227, or 228, and (b) comprises a sequence that has at least 85% identity, at least 90% identity, at least 95% identity, or 100% identity to the sequence of SEQ ID NO:261.

[0332] In one embodiment, an Fc dimer:PGRN fusion protein comprises: (a) a first Fc polypeptide linked to a progranulin polypeptide directly or through a polypeptide linker (e.g., GGGGSGGGGS (SEQ ID NO:276) or GGGGS (SEQ ID NO:277)), wherein the first Fc polypeptide comprises hole mutations T366S, L368A, and Y407V and L234A, L235A, and P329G (LALAPG) mutations, according to EU numbering scheme, and (b) a second Fc polypeptide comprising knob mutation T366W, according to EU numbering scheme. In some embodiments, the C-terminus of the progranulin polypeptide is linked to the N-terminus of the first Fc polypeptide directly or through a polypeptide linker. In some embodiments, the N-terminus of the progranulin polypeptide is linked to the C-terminus of the first Fc polypeptide directly or through a polypeptide linker. In some embodiments, the first and/or second Fc polypeptide may further be linked to an IgG1 hinge region or a portion thereof (e.g., SEQ ID NO: 91 or 109). In some embodiments, (a) comprises a sequence that has at least 85% identity, at least 90% identity, at least 95% identity, or 100% identity to the sequence of SEQ ID NO:217, 218, 229, or 230, and (b) comprises a sequence that has at least 85% identity, at least 90% identity, at least 95% identity, or 100% identity to the sequence of SEQ ID NO:261.

[0333] In one embodiment, an Fc dimer:PGRN fusion protein comprises: (a) a first Fc polypeptide linked to a progranulin polypeptide directly or through a polypeptide linker (e.g., GGGGSGGGGS (SEQ ID NO:276) or GGGGS (SEQ ID NO:277)), wherein the first Fc polypeptide comprises hole mutations T366S, L368A, and Y407V and M428L and N434S (LS) mutations, according to EU numbering scheme, and (b) a second Fc polypeptide comprising knob mutation T366W, according to EU numbering scheme. In some embodiments, the C-terminus of the progranulin polypeptide is linked to the N-terminus of the first Fc polypeptide directly or through a polypeptide linker. In some embodiments, the N-terminus of the progranulin polypeptide is linked to the C-terminus of the first Fc polypeptide directly or through a polypeptide linker. In some embodiments, the first and/or second Fc polypeptide may further be linked to an IgG1 hinge region or a portion thereof (e.g., SEQ ID NO: 91 or 109). In some embodiments, (a) comprises a sequence that has at least 85% identity, at least 90% identity, at least 95% identity, or 100% identity to the sequence of SEQ ID NO:219, 220, 231, or 232, and (b) comprises a sequence that has at least 85% identity, at least 90% identity, at least 95% identity, or 100% identity to the sequence of SEQ ID NO:261.

[0334] In one embodiment, an Fc dimer:PGRN fusion protein comprises: (a) a first Fc polypeptide linked to a progranulin polypeptide directly or through a polypeptide linker (e.g., GGGGSGGGGS (SEQ ID NO:276) or GGGGS (SEQ ID NO:277)), wherein the first Fc polypeptide comprises hole mutations T366S, L368A, and Y407V, L234A and L235A (LALA) mutations, and M428L and N434S (LS) mutations, according to EU numbering scheme, and (b) a second Fc polypeptide comprising knob mutation T366W, according to EU numbering scheme. In some embodiments, the C-terminus of the progranulin polypeptide is linked to the N-terminus of the first Fc polypeptide directly or through a polypeptide linker. In some embodiments, the N-terminus of the progranulin polypeptide is linked to the C-terminus of the first Fc polypeptide directly or through a polypeptide linker. In some embodiments, the first and/or second Fc polypeptide may further be linked to an IgG1 hinge region or a portion thereof (e.g., SEQ ID NO: 91 or 109). In some embodiments, (a) comprises a sequence that has at least 85% identity, at least 90% identity, at least 95% identity, or 100% identity to the sequence of SEQ ID NO:221, 222, 233, or 234, and (b) comprises a sequence that has at least 85% identity, at least 90% identity, at least 95% identity, or 100% identity to the sequence of SEQ ID NO:261.

[0335] In one embodiment, an Fc dimer:PGRN fusion protein comprises: (a) a first Fc polypeptide linked to a progranulin polypeptide directly or through a polypeptide linker (e.g., GGGGSGGGGS (SEQ ID NO:276) or GGGGS (SEQ ID NO:277)), wherein the first Fc polypeptide comprises hole mutations T366S, L368A, and Y407V, L234A, L235A, and P329G (LALAPG) mutations, and M428L and N434S (LS) mutations, according to EU numbering scheme, and (b) a second Fc polypeptide comprising knob mutation T366W, according to EU numbering scheme. In some embodiments, the C-terminus of the progranulin polypeptide is linked to the N-terminus of the first Fc polypeptide directly or through a polypeptide linker. In some embodiments, the N-terminus of the progranulin polypeptide is linked to the C-terminus of the first Fc polypeptide directly or through a polypeptide linker. In some embodiments, the first and/or second Fc polypeptide may further be linked to an IgG1 hinge region or a portion thereof (e.g., SEQ ID NO: 91 or 109). In some embodiments, (a) comprises a sequence that has at least 85% identity, at least 90% identity, at least 95% identity, or 100% identity to the sequence of SEQ ID NO:223, 224, 235, or 236, and (b) comprises a sequence that has at least 85% identity, at least 90% identity, at least 95% identity, or 100% identity to the sequence of SEQ ID NO:261.

[0336] In one embodiment, an Fc dimer:PGRN fusion protein comprises: (a) a first Fc polypeptide linked to a progranulin polypeptide directly or through a polypeptide linker (e.g., GGGGSGGGGS (SEQ ID NO:276) or GGGGS (SEQ ID NO:277)), wherein the first Fc polypeptide comprises hole mutations T366S, L368A, and Y407V, according to EU numbering scheme, and (b) a second Fc polypeptide comprising knob mutation T366W and L234A and L235A (LALA) mutations, according to EU numbering scheme. In some embodiments, the C-terminus of the progranulin polypeptide is linked to the N-terminus of the first Fc polypeptide directly or through a polypeptide linker. In some embodiments, the N-terminus of the progranulin polypeptide is linked to the C-terminus of the first Fc polypeptide directly or through a polypeptide linker. In some embodiments, the first and/or second Fc polypeptide may further be linked to an IgG1 hinge region or a portion thereof (e.g., SEQ ID NO: 91 or 109). In some embodiments, (a) comprises a sequence that has at least 85% identity, at least 90% identity, at least 95% identity, or 100% identity to the sequence of SEQ ID NO:213, 214, 225, or 226, and (b) comprises a sequence that has at least 85% identity, at least 90% identity, at least 95% identity, or 100% identity to the sequence of SEQ ID NO:262.

[0337] In one embodiment, an Fc dimer:PGRN fusion protein comprises: (a) a first Fc polypeptide linked to a progranulin polypeptide directly or through a polypeptide linker (e.g., GGGGSGGGGS (SEQ ID NO:276) or GGGGS (SEQ ID NO:277)), wherein the first Fc polypeptide comprises hole mutations T366S, L368A, and Y407V, according to EU numbering scheme, and (b) a second Fc polypeptide comprising knob mutation T366W and L234A, L235A, and P329G (LALAPG) mutations, according to EU numbering scheme. In some embodiments, the C-terminus of the progranulin polypeptide is linked to the N-terminus of the first Fc polypeptide directly or through a polypeptide linker. In some embodiments, the N-terminus of the progranulin polypeptide is linked to the C-terminus of the first Fc polypeptide directly or through a polypeptide linker. In some embodiments, the first and/or second Fc polypeptide may further be linked to an IgG1 hinge region or a portion thereof (e.g., SEQ ID NO: 91 or 109). In some embodiments, (a) comprises a sequence that has at least 85% identity, at least 90% identity, at least 95% identity, or 100% identity to the sequence of SEQ ID NO:213, 214, 225, or 226, and (b) comprises a sequence that has at least 85% identity, at least 90% identity, at least 95% identity, or 100% identity to the sequence of SEQ ID NO:263.

[0338] In one embodiment, an Fc dimer:PGRN fusion protein comprises: (a) a first Fc polypeptide linked to a progranulin polypeptide directly or through a polypeptide linker (e.g., GGGGSGGGGS (SEQ ID NO:276) or GGGGS (SEQ ID NO:277)), wherein the first Fc polypeptide comprises hole mutations T366S, L368A, and Y407V, according to EU numbering scheme, and (b) a second Fc polypeptide comprising knob mutation T366W and M428L and N434S (LS) mutations, according to EU numbering scheme. In some embodiments, the C-terminus of the progranulin polypeptide is linked to the N-terminus of the first Fc polypeptide directly or through a polypeptide linker. In some embodiments, the N-terminus of the progranulin polypeptide is linked to the C-terminus of the first Fc polypeptide directly or through a polypeptide linker. In some embodiments, the first and/or second Fc polypeptide may further be linked to an IgG1 hinge region or a portion thereof (e.g., SEQ ID NO: 91 or 109). In some embodiments, (a) comprises a sequence that has at least 85% identity, at least 90% identity, at least 95% identity, or 100% identity to the sequence of SEQ ID NO:213, 214, 225, or 226, and (b) comprises a sequence that has at least 85% identity, at least 90% identity, at least 95% identity, or 100% identity to the sequence of SEQ ID NO:264.

[0339] In one embodiment, an Fc dimer:PGRN fusion protein comprises: (a) a first Fc polypeptide linked to a progranulin polypeptide directly or through a polypeptide linker (e.g., GGGGSGGGGS (SEQ ID NO:276) or GGGGS (SEQ ID NO:277)), wherein the first Fc polypeptide comprises hole mutations T366S, L368A, and Y407V, according to EU numbering scheme, and (b) a second Fc polypeptide comprising knob mutation T366W, L234A and L235A (LALA) mutations, and M428L and N434S (LS) mutations, according to EU numbering scheme. In some embodiments, the C-terminus of the progranulin polypeptide is linked to the N-terminus of the first Fc polypeptide directly or through a polypeptide linker. In some embodiments, the N-terminus of the progranulin polypeptide is linked to the C-terminus of the first Fc polypeptide directly or through a polypeptide linker. In some embodiments, the first and/or second Fc polypeptide may further be linked to an IgG1 hinge region or a portion thereof (e.g., SEQ ID NO: 91 or 109). In some embodiments, (a) comprises a sequence that has at least 85% identity, at least 900% identity, at least 95% identity, or 100% identity to the sequence of SEQ ID NO:213, 214, 225, or 226, and (b) comprises a sequence that has at least 85% identity, at least 90% identity, at least 95% identity, or 100% identity to the sequence of SEQ ID NO:265.

[0340] In one embodiment, an Fc dimer:PGRN fusion protein comprises: (a) a first Fc polypeptide linked to a progranulin polypeptide directly or through a polypeptide linker (e.g., GGGGSGGGGS (SEQ ID NO:276) or GGGGS (SEQ ID NO:277)), wherein the first Fc polypeptide comprises hole mutations T366S, L368A, and Y407V, according to EU numbering scheme, and (b) a second Fc polypeptide comprising knob mutation T366W, L234A, L235A, and P329G (LALAPG) mutations, and M428L and N434S (LS) mutations, according to EU numbering scheme. In some embodiments, the C-terminus of the progranulin polypeptide is linked to the N-terminus of the first Fc polypeptide directly or through a polypeptide linker. In some embodiments, the N-terminus of the progranulin polypeptide is linked to the C-terminus of the first Fc polypeptide directly or through a polypeptide linker. In some embodiments, the first and/or second Fc polypeptide may further be linked to an IgG1 hinge region or a portion thereof (e.g., SEQ ID NO: 91 or 109). In some embodiments, (a) comprises a sequence that has at least 85% identity, at least 90% identity, at least 95% identity, or 100% identity to the sequence of SEQ ID NO:213, 214, 225, or 226, and (b) comprises a sequence that has at least 85% identity, at least 90% identity, at least 95% identity, or 100% identity to the sequence of SEQ ID NO:266.

[0341] In one embodiment, an Fc dimer:PGRN fusion protein comprises: (a) a first Fc polypeptide linked to a progranulin polypeptide directly or through a polypeptide linker (e.g., GGGGSGGGGS (SEQ ID NO:276) or GGGGS (SEQ ID NO:277)), wherein the first Fc polypeptide comprises hole mutations T366S, L368A, and Y407V and L234A and L235A (LALA) mutations, according to EU numbering scheme, and (b) a second Fc polypeptide comprising knob mutation T366W and L234A and L235A (LALA) mutations, according to EU numbering scheme. In some embodiments, the C-terminus of the progranulin polypeptide is linked to the N-terminus of the first Fc polypeptide directly or through a polypeptide linker. In some embodiments, the N-terminus of the progranulin polypeptide is linked to the C-terminus of the first Fc polypeptide directly or through a polypeptide linker. In some embodiments, the first and/or second Fc polypeptide may further be linked to an IgG1 hinge region or a portion thereof (e.g., SEQ ID NO: 91 or 109). In some embodiments, (a) comprises a sequence that has at least 85% identity, at least 90% identity, at least 95% identity, or 100% identity to the sequence of SEQ ID NO:215, 216, 227, or 228, and (b) comprises a sequence that has at least 85% identity, at least 90% identity, at least 95% identity, or 100% identity to the sequence of SEQ ID NO:262. In one embodiment, an Fc dimer:PGRN fusion protein comprises: (a) a sequence that has at least 85% identity, at least 90% c identity, at least 95% identity, or 100% identity to the sequence of SEQ ID NO:215, and (b) a sequence that has at least 85% identity, at least 90% identity, at least 95% identity, or 100% identity to the sequence of SEQ ID NO:210. In one embodiment, an Fc dimer:PGRN fusion protein comprises: (a) a sequence that has at least 85% identity, at least 90% identity, at least 95% identity, or 100% identity to the sequence of SEQ ID NO:227, and (b) a sequence that has at least 85% identity, at least 900% identity, at least 95% identity, or 100% identity to the sequence of SEQ ID NO:210. In one embodiment, an Fc dimer:PGRN fusion protein comprises: (a) a sequence that has at least 85% identity, at least 90% identity, at least 95% identity, or 100% identity to the sequence of SEQ ID NO:215, and (b) a sequence that has at least 85% identity, at least 90% identity, at least 95% identity, or 100% identity to the sequence of SEQ ID NO:291. In one embodiment, an Fc dimer:PGRN fusion protein comprises: (a) a sequence that has at least 85% identity, at least 90% identity, at least 95% identity, or 100% identity to the sequence of SEQ ID NO:227, and (b) a sequence that has at least 85% identity, at least 90% identity, at least 95% identity, or 100% identity to the sequence of SEQ ID NO:291.

[0342] In one embodiment, an Fc dimer:PGRN fusion protein comprises: (a) a first Fc polypeptide linked to a progranulin polypeptide directly or through a polypeptide linker (e.g., GGGGSGGGGS (SEQ ID NO:276) or GGGGS (SEQ ID NO:277)), wherein the first Fc polypeptide comprises hole mutations T366S, L368A, and Y407V and L234A, L235A, and P329G (LALAPG) mutations, according to EU numbering scheme, and (b) a second Fc polypeptide comprising knob mutation T366W and L234A, L235A, and P329G (LALAPG) mutations, according to EU numbering scheme. In some embodiments, the C-terminus of the progranulin polypeptide is linked to the N-terminus of the first Fc polypeptide directly or through a polypeptide linker. In some embodiments, the N-terminus of the progranulin polypeptide is linked to the C-terminus of the first Fc polypeptide directly or through a polypeptide linker. In some embodiments, the first and/or second Fc polypeptide may further be linked to an IgG1 hinge region or a portion thereof (e.g., SEQ ID NO: 91 or 109). In some embodiments, (a) comprises a sequence that has at least 85% identity, at least 90% identity, at least 95% identity, or 100% identity to the sequence of SEQ ID NO:217, 218, 229, or 230, and (b) comprises a sequence that has at least 85% identity, at least 90% identity, at least 95% identity, or 100% identity to the sequence of SEQ ID NO:263.

[0343] In one embodiment, an Fc dimer:PGRN fusion protein comprises: (a) a first Fc polypeptide linked to a progranulin polypeptide directly or through a polypeptide linker (e.g., GGGGSGGGGS (SEQ ID NO:276) or GGGGS (SEQ ID NO:277)), wherein the first Fc polypeptide comprises hole mutations T366S, L368A, and Y407V and M428L and N434S (LS) mutations, according to EU numbering scheme, and (b) a second Fc polypeptide comprising knob mutation T366W and M428L and N434S (LS) mutations, according to EU numbering scheme. In some embodiments, the C-terminus of the progranulin polypeptide is linked to the N-terminus of the first Fc polypeptide directly or through a polypeptide linker. In some embodiments, the N-terminus of the progranulin polypeptide is linked to the C-terminus of the first Fc polypeptide directly or through a polypeptide linker. In some embodiments, the first and/or second Fc polypeptide may further be linked to an IgG1 hinge region or a portion thereof (e.g., SEQ ID NO: 91 or 109). In some embodiments, (a) comprises a sequence that has at least 85% identity, at least 90% identity, at least 95% identity, or 100% identity to the sequence of SEQ ID NO:219, 220, 231, or 232, and (b) comprises a sequence that has at least 85% identity, at least 90% identity, at least 95% identity, or 100% identity to the sequence of SEQ ID NO:264.

[0344] In one embodiment, an Fc dimer:PGRN fusion protein comprises: (a) a first Fc polypeptide linked to a progranulin polypeptide directly or through a polypeptide linker (e.g., GGGGSGGGGS (SEQ ID NO:276) or GGGGS (SEQ ID NO:277)), wherein the first Fc polypeptide comprises hole mutations T366S, L368A, and Y407V and L234A and L235A (LALA) mutations, according to EU numbering scheme, and (b) a second Fc polypeptide comprising knob mutation T366W and M428L and N434S (LS) mutations, according to EU numbering scheme. In some embodiments, the C-terminus of the progranulin polypeptide is linked to the N-terminus of the first Fc polypeptide directly or through a polypeptide linker. In some embodiments, the N-terminus of the progranulin polypeptide is linked to the C-terminus of the first Fc polypeptide directly or through a polypeptide linker. In some embodiments, the first and/or second Fc polypeptide may further be linked to an IgG1 hinge region or a portion thereof (e.g., SEQ ID NO: 91 or 109). In some embodiments, (a) comprises a sequence that has at least 85% identity, at least 90% identity, at least 95% identity, or 100% identity to the sequence of SEQ ID NO:215, 216, 227, or 228, and (b) comprises a sequence that has at least 85% identity, at least 90% identity, at least 95% identity, or 100% identity to the sequence of SEQ ID NO:264.

[0345] In one embodiment, an Fc dimer:PGRN fusion protein comprises: (a) a first Fc polypeptide linked to a progranulin polypeptide directly or through a polypeptide linker (e.g., GGGGSGGGGS (SEQ ID NO:276) or GGGGS (SEQ ID NO:277)), wherein the first Fc polypeptide comprises hole mutations T366S, L368A, and Y407V and L234A, L235A, and P329G (LALAPG) mutations, according to EU numbering scheme, and (b) a second Fc polypeptide comprising knob mutation T366W and M428L and N434S (LS) mutations, according to EU numbering scheme. In some embodiments, the C-terminus of the progranulin polypeptide is linked to the N-terminus of the first Fc polypeptide directly or through a polypeptide linker. In some embodiments, the N-terminus of the progranulin polypeptide is linked to the C-terminus of the first Fc polypeptide directly or through a polypeptide linker. In some embodiments, the first and/or second Fc polypeptide may further be linked to an IgG1 hinge region or a portion thereof (e.g., SEQ ID NO: 91 or 109). In some embodiments, (a) comprises a sequence that has at least 85% identity, at least 90% identity, at least 95% identity, or 100% identity to the sequence of SEQ ID NO:217, 218, 229, or 230, and (b) comprises a sequence that has at least 85% identity, at least 90% identity, at least 95% identity, or 100% identity to the sequence of SEQ ID NO:264.

[0346] In one embodiment, an Fc dimer:PGRN fusion protein comprises: (a) a first Fc polypeptide linked to a progranulin polypeptide directly or through a polypeptide linker (e.g., GGGGSGGGGS (SEQ ID NO:276) or GGGGS (SEQ ID NO:277)), wherein the first Fc polypeptide comprises hole mutations T366S, L368A, and Y407V and M428L and N434S (LS) mutations, according to EU numbering scheme, and (b) a second Fc polypeptide comprising knob mutation T366W and L234A and L235A (LALA) mutations, according to EU numbering scheme. In some embodiments, the C-terminus of the progranulin polypeptide is linked to the N-terminus of the first Fc polypeptide directly or through a polypeptide linker. In some embodiments, the N-terminus of the progranulin polypeptide is linked to the C-terminus of the first Fc polypeptide directly or through a polypeptide linker. In some embodiments, the first and/or second Fc polypeptide may further be linked to an IgG1 hinge region or a portion thereof (e.g., SEQ ID NO: 91 or 109). In some embodiments, (a) comprises a sequence that has at least 85% identity, at least 900% identity, at least 95% identity, or 100% identity to the sequence of SEQ ID NO:219, 220, 231, or 232, and (b) comprises a sequence that has at least 85% identity, at least 90% identity, at least 95% identity, or 100% identity to the sequence of SEQ ID NO:262.

[0347] In one embodiment, an Fc dimer:PGRN fusion protein comprises: (a) a first Fc polypeptide linked to a progranulin polypeptide directly or through a polypeptide linker (e.g., GGGGSGGGGS (SEQ ID NO:276) or GGGGS (SEQ ID NO:277)), wherein the first Fc polypeptide comprises hole mutations T366S, L368A, and Y407V and M428L and N434S (LS) mutations, according to EU numbering scheme, and (b) a second Fc polypeptide comprising knob mutation T366W and L234A, L235A, and P329G (LALAPG) mutations, according to EU numbering scheme. In some embodiments, the C-terminus of the progranulin polypeptide is linked to the N-terminus of the first Fc polypeptide directly or through a polypeptide linker. In some embodiments, the N-terminus of the progranulin polypeptide is linked to the C-terminus of the first Fc polypeptide directly or through a polypeptide linker. In some embodiments, the first and/or second Fc polypeptide may further be linked to an IgG1 hinge region or a portion thereof (e.g., SEQ ID NO: 91 or 109). In some embodiments, (a) comprises a sequence that has at least 85% identity, at least 90% identity, at least 95% identity, or 100% identity to the sequence of SEQ ID NO:219, 220, 231, or 232, and (b) comprises a sequence that has at least 85% identity, at least 90% identity, at least 95% identity, or 100% identity to the sequence of SEQ ID NO:263.

[0348] In one embodiment, an Fc dimer:PGRN fusion protein comprises: (a) a first Fc polypeptide linked to a progranulin polypeptide directly or through a polypeptide linker (e.g., GGGGSGGGGS (SEQ ID NO:276) or GGGGS (SEQ ID NO:277)), wherein the first Fc polypeptide comprises hole mutations T366S, L368A, and Y407V, L234A and L235A (LALA) mutations, and M428L and N434S (LS) mutations, according to EU numbering scheme, and (b) a second Fc polypeptide comprising knob mutation T366W, L234A and L235A (LALA) mutations, and M428L and N434S (LS) mutations according to EU numbering scheme. In some embodiments, the C-terminus of the progranulin polypeptide is linked to the N-terminus of the first Fc polypeptide directly or through a polypeptide linker. In some embodiments, the N-terminus of the progranulin polypeptide is linked to the C-terminus of the first Fc polypeptide directly or through a polypeptide linker. In some embodiments, the first and/or second Fc polypeptide may further be linked to an IgG1 hinge region or a portion thereof (e.g., SEQ ID NO: 91 or 109). In some embodiments, (a) comprises a sequence that has at least 85% identity, at least 90% identity, at least 95% identity, or 100% identity to the sequence of SEQ ID NO:221, 222, 233, or 234, and (b) comprises a sequence that has at least 85% identity, at least 90% identity, at least 95% identity, or 100% identity to the sequence of SEQ ID NO:265.

[0349] In one embodiment, an Fc dimer:PGRN fusion protein comprises: (a) a first Fc polypeptide linked to a progranulin polypeptide directly or through a polypeptide linker (e.g., GGGGSGGGGS (SEQ ID NO:276) or GGGGS (SEQ ID NO:277)), wherein the first Fc polypeptide comprises hole mutations T366S, L368A, and Y407V, L234A, L235A, and P329G (LALAPG) mutations, and M428L and N434S (LS) mutations, according to EU numbering scheme, and (b) a second Fc polypeptide comprising knob mutation T366W, L234A, L235A, and P329G (LALAPG) mutations, and M428L and N434S (LS) mutations, according to EU numbering scheme. In some embodiments, the C-terminus of the progranulin polypeptide is linked to the N-terminus of the first Fc polypeptide directly or through a polypeptide linker. In some embodiments, the N-terminus of the progranulin polypeptide is linked to the C-terminus of the first Fc polypeptide directly or through a polypeptide linker. In some embodiments, the first and/or second Fc polypeptide may further be linked to an IgG1 hinge region or a portion thereof (e.g., SEQ ID NO: 91 or 109). In some embodiments, (a) comprises a sequence that has at least 85% identity, at least 90% identity, at least 95% identity, or 100% identity to the sequence of SEQ ID NO:223, 224, 235, or 236, and (b) comprises a sequence that has at least 85% identity, at least 90% identity, at least 95% identity, or 100% identity to the sequence of SEQ ID NO:266.

[0350] In any of the embodiments described above, an Fc dimer:PGRN fusion protein may comprise a first Fc polypeptide having the knob mutation T366W and the second Fc polypeptide having the hole mutations T366S, L368A, and Y407V, in which the first Fc polypeptide is linked to a progranulin polypeptide directly or through a polypeptide linker.

[0351] In any of the embodiments described above, a progranulin polypeptide may also be linked to the second Fc polypeptide, creating an Fc dimer:PGRN fusion protein comprising two progranulin polypeptides. For example, the C-terminus of the first and second progranulin polypeptides may be linked to the N-terminus of the first and second Fc polypeptides, respectively, directly or through a polypeptide linker. In another example, the N-terminus of the first and second progranulin polypeptides may be linked to the C-terminus of the first and second Fc polypeptides, respectively, directly or through a polypeptide linker. In another example, the C-terminus of the first progranulin polypeptide may be linked to the N-terminus of the first Fc polypeptide, and the N-terminus of the second progranulin polypeptide may be linked to the C-terminus of the second Fc polypeptide. In another example, the N-terminus of the first progranulin polypeptide may be linked to the C-terminus of the first Fc polypeptide, and the C-terminus of the second progranulin polypeptide may be linked to the N-terminus of the second Fc polypeptide. In some embodiments of the Fc dimer:PGRN fusion protein comprising two progranulin polypeptides, wherein each of the two progranulin polypeptides is linked to an Fc polypeptide through a polypeptide linker, the two polypeptide linkers in the fusion protein can be the same or different. For example, the two polypeptide linkers can each independently be a Gly₄-Ser linker (SEQ ID NO:277) or a (Gly₄-Ser)₂ linker (SEQ ID NO:276).

[0352] In any of the embodiments described above, the first Fc polypeptide or the second Fc polypeptide may comprise TfR-binding mutations. In some embodiments, the first Fc polypeptide may comprise TfR-binding mutations. The first Fc polypeptide may comprise a sequence of any one of SEQ ID NOS:101, 102, 143-145, 155-157, 167-169, 179-181, 191-193, and 203-205. In some embodiments, the second Fc polypeptide may comprise TfR-binding mutations. The second Fc polypeptide may comprise a sequence of any one of SEQ ID NOS:93, 94, 136-139, 149-151, 161-163, 173-175, 185-187, and 197-199. In some embodiments, both the first and second Fc polypeptides may comprise TfR-binding mutations.

[0353] In particular embodiments, an Fc dimer:PGRN fusion protein comprises: (a) a first Fc polypeptide linked to a progranulin polypeptide directly or through a polypeptide linker (e.g., GGGGSGGGGS (SEQ ID NO:276) or GGGGS (SEQ ID NO:277)), wherein the first Fc polypeptide comprises hole mutations T366S, L368A, and Y407V, according to EU numbering scheme, and (b) a second Fc polypeptide comprising knob mutation T366W, according to EU numbering scheme, and TfR-binding mutations. In some embodiments, the C-terminus of the progranulin polypeptide is linked to the N-terminus of the first Fc polypeptide directly or through a polypeptide linker. In some embodiments, the N-terminus of the progranulin polypeptide is linked to the C-terminus of the first Fc polypeptide directly or through a polypeptide linker. In some embodiments, the first and/or second Fc polypeptide may further be linked to an IgG1 hinge region or a portion thereof (e.g., SEQ ID NO: 91 or 109). In some embodiments, the first and/or second Fc polypeptide may comprise L234A and L235A with or without P329G mutations, and/or M428L and N434S (LS) mutations.

[0354] In certain embodiments of the Fc dimer:PGRN fusion protein, (a) comprises a sequence that has at least 85% identity, at least 90% identity, at least 95% identity, or 100% identity to the sequence of SEQ ID NO:213, 214, 225, or 226, and (b) comprises a sequence that has at least 85% identity, at least 90% identity, at least 95% identity, or 100% identity to the sequence of SEQ ID NO:281.

[0355] In certain embodiments of the Fc dimer:PGRN fusion protein, (a) comprises a sequence that has at least 85% identity, at least 90% identity, at least 95% identity, or 100% identity to the sequence of SEQ ID NO:215, 216, 227, or 228, and (b) comprises a sequence that has at least 85% identity, at least 90% identity, at least 95% identity, or 100% identity to the sequence of SEQ ID NO:281.

[0356] In certain embodiments of the Fc dimer:PGRN fusion protein, (a) comprises a sequence that has at least 85% identity, at least 90% identity, at least 95% identity, or 100% identity to the sequence of SEQ ID NO:217, 218, 229, or 230, and (b) comprises a sequence that has at least 85% identity, at least 90% identity, at least 95% identity, or 100% identity to the sequence of SEQ ID NO:281.

[0357] In certain embodiments of the Fc dimer:PGRN fusion protein, (a) comprises a sequence that has at least 85% identity, at least 90% identity, at least 95% identity, or 100% identity to the sequence of SEQ ID NO:219, 220, 231, or 232, and (b) comprises a sequence that has at least 85% identity, at least 90% identity, at least 95% identity, or 100% identity to the sequence of SEQ ID NO:281.

[0358] In certain embodiments of the Fc dimer:PGRN fusion protein, (a) comprises a sequence that has at least 85% identity, at least 90% identity, at least 95% identity, or 100% identity to the sequence of SEQ ID NO:221, 222, 233, or 234, and (b) comprises a sequence that has at least 85% identity, at least 90% identity, at least 95% identity, or 100% identity to the sequence of SEQ ID NO:281.

[0359] In certain embodiments of the Fc dimer:PGRN fusion protein, (a) comprises a sequence that has at least 85% identity, at least 90% identity, at least 95% identity, or 100% identity to the sequence of SEQ ID NO:223, 224, 235, or 236, and (b) comprises a sequence that has at least 85% identity, at least 90% identity, at least 95% identity, or 100% identity to the sequence of SEQ ID NO:281.

[0360] In certain embodiments of the Fc dimer:PGRN fusion protein, (a) comprises a sequence that has at least 85% identity, at least 90% identity, at least 95% identity, or 100% identity to the sequence of SEQ ID NO:213, 214, 225, or 226, and (b) comprises a sequence that has at least 85% identity, at least 90% identity, at least 95% identity, or 100% identity to the sequence of SEQ ID NO:210.

[0361] In certain embodiments of the Fc dimer:PGRN fusion protein, (a) comprises a sequence that has at least 85% identity, at least 90% identity, at least 95% identity, or 100% identity to the sequence of SEQ ID NO:213, 214, 225, or 226, and (b) comprises a sequence that has at least 85% identity, at least 90% identity, at least 95% identity, or 100% identity to the sequence of SEQ ID NO:282.

[0362] In certain embodiments of the Fc dimer:PGRN fusion protein, (a) comprises a sequence that has at least 85% identity, at least 90% identity, at least 95% identity, or 100% identity to the sequence of SEQ ID NO:213, 214, 225, or 226, and (b) comprises a sequence that has at least 85% identity, at least 90% identity, at least 95% identity, or 100% identity to the sequence of SEQ ID NO:283.

[0363] In certain embodiments of the Fc dimer:PGRN fusion protein, (a) comprises a sequence that has at least 85% identity, at least 90% identity, at least 95% identity, or 100% identity to the sequence of SEQ ID NO:213, 214, 225, or 226, and (b) comprises a sequence that has at least 85% identity, at least 90% identity, at least 95% identity, or 100% identity to the sequence of SEQ ID NO:284.

[0364] In certain embodiments of the Fc dimer:PGRN fusion protein, (a) comprises a sequence that has at least 85% identity, at least 90% identity, at least 95% identity, or 100% identity to the sequence of SEQ ID NO:213, 214, 225, or 226, and (b) comprises a sequence that has at least 85% identity, at least 90% identity, at least 95% identity, or 100% identity to the sequence of SEQ ID NO:285.

[0365] In certain embodiments of the Fc dimer:PGRN fusion protein, (a) comprises a sequence that has at least 85% identity, at least 90% identity, at least 95% identity, or 100% identity to the sequence of SEQ ID NO:215, 216, 227, or 228, and (b) comprises a sequence that has at least 85% identity, at least 90% identity, at least 95% identity, or 100% identity to the sequence of SEQ ID NO:210.

[0366] In certain embodiments of the Fc dimer:PGRN fusion protein, (a) comprises a sequence that has at least 850% identity, at least 90% identity, at least 95% identity, or 100% identity to the sequence of SEQ ID NO:217, 218, 229, or 230, and (b) comprises a sequence that has at least 85% identity, at least 90% identity, at least 95% identity, or 100% identity to the sequence of SEQ ID NO:282.

[0367] In certain embodiments of the Fc dimer:PGRN fusion protein, (a) comprises a sequence that has at least 85% identity, at least 90% identity, at least 95% identity, or 100% identity to the sequence of SEQ ID NO:219, 220, 231, or 232, and (b) comprises a sequence that has at least 85% identity, at least 90% identity, at least 95% identity, or 100% identity to the sequence of SEQ ID NO:283.

[0368] In certain embodiments of the Fc dimer:PGRN fusion protein, (a) comprises a sequence that has at least 85% identity, at least 90% identity, at least 95% identity, or 100% identity to the sequence of SEQ ID NO:215, 216, 227, or 228, and (b) comprises a sequence that has at least 85% identity, at least 90% identity, at least 95% identity, or 100% identity to the sequence of SEQ ID NO:283.

[0369] In certain embodiments of the Fc dimer:PGRN fusion protein, (a) comprises a sequence that has at least 85% identity, at least 90% identity, at least 95% identity, or 100% identity to the sequence of SEQ ID NO:217, 218, 229, or 230, and (b) comprises a sequence that has at least 85% identity, at least 90% identity, at least 95% identity, or 100% identity to the sequence of SEQ ID NO:283.

[0370] In certain embodiments of the Fc dimer:PGRN fusion protein, (a) comprises a sequence that has at least 85% identity, at least 90% identity, at least 95% identity, or 100% identity to the sequence of SEQ ID NO:219, 220, 231, or 232, and (b) comprises a sequence that has at least 85% identity, at least 90% identity, at least 95% identity, or 100% identity to the sequence of SEQ ID NO:210.

[0371] In certain embodiments of the Fc dimer:PGRN fusion protein, (a) comprises a sequence that has at least 85% identity, at least 90% identity, at least 95% identity, or 100% identity to the sequence of SEQ ID NO:219, 220, 231, or 232, and (b) comprises a sequence that has at least 85% identity, at least 900% identity, at least 95% identity, or 100% identity to the sequence of SEQ ID NO:282.

[0372] In certain embodiments of the Fc dimer:PGRN fusion protein, (a) comprises a sequence that has at least 85% identity, at least 90% identity, at least 95% identity, or 100% identity to the sequence of SEQ ID NO:221, 222, 233, or 234, and (b) comprises a sequence that has at least 85% identity, at least 90% identity, at least 95% identity, or 100% identity to the sequence of SEQ ID NO:284.

[0373] In certain embodiments of the Fc dimer:PGRN fusion protein, (a) comprises a sequence that has at least 85% identity, at least 90% identity, at least 95% identity, or 100% identity to the sequence of SEQ ID NO:223, 224, 235, or 236, and (b) comprises a sequence that has at least 85% identity, at least 90% identity, at least 95% identity, or 100% identity to the sequence of SEQ ID NO:285.

[0374] In certain embodiments of the Fc dimer:PGRN fusion protein, (a) comprises a sequence that has at least 85% identity, at least 90% identity, at least 95% identity, or 100% identity to the sequence of SEQ ID NO:213, 214, 225, or 226, and (b) comprises a sequence that has at least 85% identity, at least 90% identity, at least 95% identity, or 100% identity to the sequence of SEQ ID NO:286.

[0375] In certain embodiments of the Fc dimer:PGRN fusion protein, (a) comprises a sequence that has at least 85% identity, at least 90% identity, at least 95% identity, or 100% identity to the sequence of SEQ ID NO:215, 216, 227, or 228, and (b) comprises a sequence that has at least 85% identity, at least 90% identity, at least 95% identity, or 100% identity to the sequence of SEQ ID NO:286.

[0376] In certain embodiments of the Fc dimer:PGRN fusion protein, (a) comprises a sequence that has at least 85% identity, at least 90% identity, at least 95% identity, or 100% identity to the sequence of SEQ ID NO:217, 218, 229, or 230, and (b) comprises a sequence that has at least 85% identity, at least 90% identity, at least 95% identity, or 100% identity to the sequence of SEQ ID NO:286.

[0377] In certain embodiments of the Fc dimer:PGRN fusion protein, (a) comprises a sequence that has at least 85% identity, at least 90% identity, at least 95% identity, or 100% identity to the sequence of SEQ ID NO:219, 220, 231, or 232, and (b) comprises a sequence that has at least 85% identity, at least 900% identity, at least 95% identity, or 100% identity to the sequence of SEQ ID NO:286.

[0378] In certain embodiments of the Fc dimer:PGRN fusion protein, (a) comprises a sequence that has at least 85% identity, at least 90% identity, at least 95% identity, or 100% identity to the sequence of SEQ ID NO:221, 222, 233, or 234, and (b) comprises a sequence that has at least 85% identity, at least 90% identity, at least 95% identity, or 100% identity to the sequence of SEQ ID NO:286.

[0379] In certain embodiments of the Fc dimer:PGRN fusion protein, (a) comprises a sequence that has at least 85% identity, at least 90% identity, at least 95% identity, or 100% identity to the sequence of SEQ ID NO:223, 224, 235, or 236, and (b) comprises a sequence that has at least 85% identity, at least 90% identity, at least 95% identity, or 100% identity to the sequence of SEQ ID NO:286.

[0380] In certain embodiments of the Fc dimer:PGRN fusion protein, (a) comprises a sequence that has at least 85% identity, at least 90% identity, at least 95% identity, or 100% identity to the sequence of SEQ ID NO:213, 214, 225, or 226, and (b) comprises a sequence that has at least 85% identity, at least 90% identity, at least 95% identity, or 100% identity to the sequence of SEQ ID NO:209.

[0381] In certain embodiments of the Fc dimer:PGRN fusion protein, (a) comprises a sequence that has at least 85% identity, at least 90% identity, at least 95% identity, or 100% identity to the sequence of SEQ ID NO:213, 214, 225, or 226, and (b) comprises a sequence that has at least 85% identity, at least 90% identity, at least 95% identity, or 100% identity to the sequence of SEQ ID NO:287.

[0382] In certain embodiments of the Fc dimer:PGRN fusion protein, (a) comprises a sequence that has at least 85% identity, at least 90% identity, at least 95% identity, or 100% identity to the sequence of SEQ ID NO:213, 214, 225, or 226, and (b) comprises a sequence that has at least 85% identity, at least 90% identity, at least 95% identity, or 100% identity to the sequence of SEQ ID NO:288.

[0383] In certain embodiments of the Fc dimer:PGRN fusion protein, (a) comprises a sequence that has at least 85% identity, at least 90% identity, at least 95% identity, or 100% identity to the sequence of SEQ ID NO:213, 214, 225, or 226, and (b) comprises a sequence that has at least 85% identity, at least 90% identity, at least 95% identity, or 100% identity to the sequence of SEQ ID NO:289.

[0384] In certain embodiments of the Fc dimer:PGRN fusion protein, (a) comprises a sequence that has at least 850% identity, at least 90% identity, at least 95% identity, or 100% identity to the sequence of SEQ ID NO:213, 214, 225, or 226, and (b) comprises a sequence that has at least 85% identity, at least 90% identity, at least 95% identity, or 100% identity to the sequence of SEQ ID NO:290.

[0385] In certain embodiments of the Fc dimer:PGRN fusion protein, (a) comprises a sequence that has at least 85% identity, at least 90% identity, at least 95% identity, or 100% identity to the sequence of SEQ ID NO:213, 214, 225, or 226, and (b) comprises a sequence that has at least 85% identity, at least 90% identity, at least 95% identity, or 100% identity to the sequence of SEQ ID NO:291.

[0386] In certain embodiments of the Fc dimer:PGRN fusion protein, (a) comprises a sequence that has at least 85% identity, at least 90% identity, at least 95% identity, or 100% identity to the sequence of SEQ ID NO:215, 216, 227, or 228, and (b) comprises a sequence that has at least 85% identity, at least 90% identity, at least 95% identity, or 100% identity to the sequence of SEQ ID NO:209.

[0387] In certain embodiments of the Fc dimer:PGRN fusion protein, (a) comprises a sequence that has at least 85% identity, at least 90% identity, at least 95% identity, or 100% identity to the sequence of SEQ ID NO:217, 218, 229, or 230, and (b) comprises a sequence that has at least 85% identity, at least 90% identity, at least 95% identity, or 100% identity to the sequence of SEQ ID NO:287.

[0388] In certain embodiments of the Fc dimer:PGRN fusion protein, (a) comprises a sequence that has at least 85% identity, at least 90% identity, at least 95% identity, or 100% identity to the sequence of SEQ ID NO:219, 220, 231, or 232, and (b) comprises a sequence that has at least 85% identity, at least 90% identity, at least 95% identity, or 100% identity to the sequence of SEQ ID NO:288.

[0389] In certain embodiments of the Fc dimer:PGRN fusion protein, (a) comprises a sequence that has at least 85% identity, at least 90% identity, at least 95% identity, or 100% identity to the sequence of SEQ ID NO:215, 216, 227, or 228, and (b) comprises a sequence that has at least 85% identity, at least 90% identity, at least 95% identity, or 100% identity to the sequence of SEQ ID NO:288.

[0390] In certain embodiments of the Fc dimer:PGRN fusion protein, (a) comprises a sequence that has at least 850% identity, at least 90% identity, at least 95% identity, or 100% identity to the sequence of SEQ ID NO:217, 218, 229, or 230, and (b) comprises a sequence that has at least 85% identity, at least 90% identity, at least 95% identity, or 100% identity to the sequence of SEQ ID NO:288.

[0391] In certain embodiments of the Fc dimer:PGRN fusion protein, (a) comprises a sequence that has at least 85% identity, at least 90% identity, at least 95% identity, or 100% identity to the sequence of SEQ ID NO:219, 220, 231, or 232, and (b) comprises a sequence that has at least 85% identity, at least 90% identity, at least 95% identity, or 100% identity to the sequence of SEQ ID NO:209.

[0392] In certain embodiments of the Fc dimer:PGRN fusion protein, (a) comprises a sequence that has at least 85% identity, at least 90% identity, at least 95% identity, or 100% identity to the sequence of SEQ ID NO:219, 220, 231, or 232, and (b) comprises a sequence that has at least 85% identity, at least 90% identity, at least 95% identity, or 100% identity to the sequence of SEQ ID NO:287.

[0393] In certain embodiments of the Fc dimer:PGRN fusion protein, (a) comprises a sequence that has at least 85% identity, at least 90% identity, at least 95% identity, or 100% identity to the sequence of SEQ ID NO:221, 222, 233, or 234, and (b) comprises a sequence that has at least 85% identity, at least 90% identity, at least 95% identity, or 100% identity to the sequence of SEQ ID NO:289.

[0394] In certain embodiments of the Fc dimer:PGRN fusion protein, (a) comprises a sequence that has at least 85% identity, at least 90% identity, at least 95% identity, or 100% identity to the sequence of SEQ ID NO:223, 224, 235, or 236, and (b) comprises a sequence that has at least 85% identity, at least 90% identity, at least 95% identity, or 100% identity to the sequence of SEQ ID NO:290.

[0395] In certain embodiments of the Fc dimer:PGRN fusion protein, (a) comprises a sequence that has at least 85% identity, at least 90% identity, at least 95% identity, or 100% identity to the sequence of SEQ ID NO:223, 224, 235, or 236, and (b) comprises a sequence that has at least 85% identity, at least 900% identity, at least 95% identity, or 100% identity to the sequence of SEQ ID NO:291.

[0396] In certain embodiments of the Fc dimer:PGRN fusion protein, (a) comprises a sequence that has at least 85% identity, at least 90% identity, at least 95% identity, or 100% identity to the sequence of SEQ ID NO:215, and (b) comprises a sequence that has at least 85% identity, at least 90% identity, at least 95% identity, or 100% identity to the sequence of SEQ ID NO:210.

[0397] In certain embodiments of the Fc dimer:PGRN fusion protein, (a) comprises a sequence that has at least 85% identity, at least 90% identity, at least 95% identity, or 100% identity to the sequence of SEQ ID NO:227, and (b) comprises a sequence that has at least 85% identity, at least 90% identity, at least 95% identity, or 100% identity to the sequence of SEQ ID NO:210.

[0398] In certain embodiments of the Fc dimer:PGRN fusion protein, (a) comprises a sequence that has at least 85% identity, at least 90% identity, at least 95% identity, or 100% identity to the sequence of SEQ ID NO:215, and (b) comprises a sequence that has at least 85% identity, at least 90% identity, at least 95% identity, or 100% identity to the sequence of SEQ ID NO:291.

[0399] In certain embodiments of the Fc dimer:PGRN fusion protein, (a) comprises a sequence that has at least 85% identity, at least 90% identity, at least 95% identity, or 100% identity to the sequence of SEQ ID NO:227, and (b) comprises a sequence that has at least 85% identity, at least 90% identity, at least 95% identity, or 100% identity to the sequence of SEQ ID NO:291.

[0400] In any of the embodiments described above, the partial hinge (DKTHTCPPCP (SEQ ID NO:109)) and/or the glycine-rich linker present in the sequence of any one of SEQ ID NOS:209, 210, 213-275, and 281-291 may be removed. In certain embodiments, the Fc dimer:PGRN fusion protein comprises a sequence of any one of SEQ ID NOS:209, 210, 213-275, and 281-291 without the partial hinge and/or the glycine-rich linker. In other embodiments, the partial hinge present in the sequence of any one of SEQ ID NOS:209, 210, 213-275, and 281-291 may be replaced by a full hinge sequence (e.g., EPKSCDKTHTCPPCP (SEQ ID NO:91)). In any of the embodiments described above, the partial hinge (DKTHTCPPCP (SEQ ID NO:109)) and/or the glycine-rich linker present in the sequence of SEQ ID NO:215 or 227 may be removed. In certain embodiments, the Fc dimer:PGRN fusion protein comprises a sequence of SEQ ID NO:215 or 227 without the partial hinge and/or the glycine-rich linker. In other embodiments, the partial hinge present in the sequence of SEQ ID NO:215 or 227 may be replaced by a full hinge sequence (e.g., EPKSCDKTHTCPPCP (SEQ ID NO:91)).

### IX. Binding Properties

[0401] Fusion proteins described herein may have a broad range of binding affinities. For example, in some embodiments, a protein has an affinity for a blood-brain barrier (BBB) receptor, e.g., transferrin receptor (TfR), ranging anywhere from 1 μM to 10 μM. In some embodiments, the affinity for TfR ranges from 1 nM to 5 μM, or from 10 nM to 1 μM.

[0402] Methods for analyzing binding affinity, binding kinetics, and cross-reactivity to analyze binding to a BBB receptor, e.g., TfR, are known in the art. These methods include, but are not limited to, solid-phase binding assays (e.g., ELISA assay), immunoprecipitation, surface plasmon resonance (e.g., Biacore™ (GE Healthcare, Piscataway, N.J.)), kinetic exclusion assays (e.g., KinExA®), flow cytometry, fluorescence-activated cell sorting (FACS), BioLayer interferometry (e.g., Octet® (FortéBio, Inc., Menlo Park, Calif.)), and Western blot analysis. In some embodiments, ELISA is used to determine binding affinity and/or cross-reactivity. Methods for performing ELISA assays are known in the art and are also described in the Example section below. In some embodiments, surface plasmon resonance (SPR) is used to determine binding affinity, binding kinetics, and/or cross-reactivity. In some embodiments, kinetic exclusion assays are used to determine binding affinity, binding kinetics, and/or cross-reactivity. In some embodiments, BioLayer interferometry assays are used to determine binding affinity, binding kinetics, and/or cross-reactivity.

### X. Linkage Between Progranulin Polypeptides and Fc Polypeptides

[0403] In some embodiments, a fusion protein described herein comprises two Fc polypeptides as described herein and one or both of the Fc polypeptides may further comprise a partial or full hinge region. The hinge region can be from any immunoglobulin subclass or isotype. An illustrative immunoglobulin hinge is an IgG hinge region, such as an IgG1 hinge region, e.g., human IgG1 hinge amino acid sequence EPKSCDKTHTCPPCP (SEQ ID NO:91) or a portion thereof (e.g., DKTHTCPPCP; SEQ ID NO:109). In some embodiments, the hinge region is at the N-terminal region of the Fc polypeptide.

[0404] In some embodiments, the partial hinge (DKTHTCPPCP (SEQ ID NO:109)) present in the sequence of any one of SEQ ID NOS:213-275 may be removed. In other embodiments, the partial hinge (DKTHTCPPCP (SEQ ID NO:109)) present in the sequence of any one of SEQ ID NOS:213-275 may be replaced by the full hinge (EPKSCDKTHTCPPCP (SEQ ID NO:91)). In some embodiments, the partial hinge (DKTHTCPPCP (SEQ ID NO:109)) present in the sequence of SEQ ID NOS:215 or 227 may be removed. In other embodiments, the partial hinge (DKTHTCPPCP (SEQ ID NO:109)) present in the sequence of SEQ ID NO:215 or 227 may be replaced by the full hinge (EPKSCDKTHTCPPCP (SEQ ID NO:91)).

[0405] In some embodiments, an Fc polypeptide is joined to the progranulin polypeptide by a linker, e.g., a polypeptide linker. In some embodiments, the Fc polypeptide is joined to the progranulin polypeptide by a peptide bond or by a polypeptide linker, e.g., is a fusion polypeptide. The polypeptide linker may be configured such that it allows for the rotation of the progranulin polypeptide relative to the Fc polypeptide to which it is joined; and/or is resistant to digestion by proteases. Polypeptide linkers may contain natural amino acids, unnatural amino acids, or a combination thereof. In some embodiments, the polypeptide linker may be a flexible linker, e.g., containing amino acids such as Gly, Asn, Ser, Thr, Ala, and the like. Such linkers are designed using known parameters and may be of any length and contain any number of repeat units of any length (e.g., repeat units of Gly and Ser residues). For example, the linker may have repeats, such as two, three, four, five, or more Gly₄-Ser repeats or a single Gly₄-Ser. In some embodiments, the polypeptide linker may include a protease cleavage site, e.g., that is cleavable by an enzyme present in the central nervous system.

[0406] In some embodiments, the progranulin polypeptide is joined to the N-terminus of the Fc polypeptide, e.g., by a Gly₄-Ser linker (SEQ ID NO:277) or a (Gly₄-Ser)₂ linker (SEQ ID NO:276). In some embodiments, the Fc polypeptide may comprise a hinge sequence or partial hinge sequence at the N-terminus that is joined to the linker or directly joined to the progranulin polypeptide.

[0407] In some embodiments, the progranulin polypeptide is joined to the C-terminus of the Fc polypeptide, e.g., by a Gly₄-Ser linker (SEQ ID NO:277) or a (Gly₄-Ser)₂ linker (SEQ ID NO:276). In some embodiments, the C-terminus of the Fc polypeptide is directly joined to the progranulin polypeptide.

[0408] In some embodiments, the polypeptide linker between the Fc polypeptide and the progranulin polypeptide can have 3-200 (e.g., 3-180, 3-160, 3-140, 3-120, 3-100, 3-80, 3-60, 3-40, 3-20, 3-10, 3-5, 5-200, 10-200, 20-200, 40-200, 60-200, 80-200, 100-200, 120-200, 140-200, 160-200, 180-200, 3, 5, 7, 10, 20, 30, 40, 50, 60, 70, 80, 90, 100, 110, 120, 130, 140, 150, 160, 170, 180, 190, or 200) amino acids. Suitable polypeptide linkers are known in the art (e.g., as described in Chen et al. Adv. Drug Deliv Rev. 65(10):1357-1369, 2013), and include, for example, polypeptide linkers containing flexible amino acid residues such as glycine and serine. In certain embodiments, a polypeptide linker can be a polyglycine linker, e.g., (Gly)ₙ, in which n is an integer between 1 and 10. In certain embodiments, a polypeptide linker can contain motifs, e.g., multiple or repeating motifs, of (GS)ₙ, (GGS)ₙ, (GGGGS (SEQ ID NO:277))ₙ, (GGSG (SEQ ID NO:304))ₙ, or (SGGG (SEQ ID NO:305))ₙ, in which n is an integer between 1 and 10. In other embodiments, a polypeptide linker can also contain amino acids other than glycine and serine, e.g., KESGSVSSEQLAQFRSLD (SEQ ID NO:306), EGKSSGSGSESKST (SEQ ID NO:307), and GSAGSAAGSGEF (SEQ ID NO:308). In other embodiments, polypeptide linkers can also be rigid polypeptide linkers. In some embodiments, rigid polypeptide linkers can adopt an α-helical conformation, which can be stabilized by intra-segment hydrogen bonds and/or intra-segment salt bridges. Examples of rigid polypeptide linkers include, but are not limited to, A(EAAAK)ₙA (SEQ ID NO:309), in which n is an integer between 2 and 5, and (XP)ₙ, in which X is Ala, Lys, or Glu, and n is an integer between 1 and 10, as described in Chen et al. Adv. Drug Deliv Rev. 65(10):1357-1369, 2013.

[0409] In some embodiments, the progranulin polypeptide is joined to the Fc polypeptide by a chemical cross-linking agent. Such conjugates can be generated using well-known chemical cross-linking reagents and protocols. For example, there are a large number of chemical cross-linking agents that are known to those skilled in the art and useful for cross-linking the polypeptide with an agent of interest. For example, the cross-linking agents are heterobifunctional cross-linkers, which can be used to link molecules in a stepwise manner. Heterobifunctional cross-linkers provide the ability to design more specific coupling methods for conjugating proteins, thereby reducing the occurrences of unwanted side reactions such as homo-protein polymers. A wide variety of heterobifunctional cross-linkers are known in the art, including N-hydroxysuccinimide (NHS) or its water soluble analog N-hydroxysulfosuccinimide (sulfo-NHS), succinimidyl 4-(N-maleimidomethyl)cyclohexane-1-carboxylate (SMCC), m-maleimidobenzoyl-N-hydroxysuccinimide ester (MBS); N-succinimidyl (4-iodoacetyl) aminobenzoate (SLAB), succinimidyl 4-(p-maleimidophenyl)butyrate (SMPB), 1-ethyl-3-(3-dimethylaminopropyl)carbodiimide hydrochloride (EDC); 4-succinimidyloxycarbonyl-a-methyl-a-(2-pyridyldithio)-toluene (SMPT), N-succinimidyl 3-(2-pyridyldithio)propionate (SPDP), and succinimidyl 6-[3-(2-pyridyldithio)propionate]hexanoate (LC-SPDP). Those cross-linking agents having N-hydroxysuccinimide moieties can be obtained as the N-hydroxysulfosuccinimide analogs, which generally have greater water solubility. In addition, those cross-linking agents having disulfide bridges within the linking chain can be synthesized instead as the alkyl derivatives so as to reduce the amount of linker cleavage in vivo. In addition to the heterobifunctional cross-linkers, there exist a number of other cross-linking agents including homobifunctional and photoreactive cross-linkers. Disuccinimidyl subcrate (DSS), bismaleimidohexane (BMH) and dimethylpimelimidate.2HCl (DMP) are examples of useful homobifunctional cross-linking agents, and bis-[B-(4-azidosalicylamido)ethyl]disulfide (BASED) and N-succinimidyl-6(4′-azido-2′-nitrophenylamino)hexanoate (SANPAH) are examples of useful photoreactive cross-linkers.

### XI. Evaluation of Effects of Fusion Proteins

[0410] Activity of fusion proteins described herein that comprise a progranulin polypeptide or a variant thereof, can be assessed using various assays, including assays that measure activity in vitro or in vivo. As described in the Examples, cellular uptake of the fusion proteins described herein may be assayed using bone marrow derived macrophages (BMDMs) and immunostaining with antibodies against human progranulin and human Fc. Proteolysis activity of the cells after the cells are treated with the fusion proteins described herein may be measured using the DQ-BSA assay described in Example 4. Cellular effects caused by GRN mutation (e.g., increased cathepsin D activity and elevated mRNA levels of lysosomal genes such as Cts1, Tmem/06b, and Psap) may be evaluated again after the cells are treated with the fusion proteins described herein (Examples 6 and 7). Fluorgenic probes and qPCR techniques may be used in these assays. Finally, pharmacokinetic properties and brain uptake of the fusion proteins described herein may be determined using wild-type and/or transgenic mice, as shown in Examples 9 and 10.

[0411] For cellular samples, the assay may include disrupting the cells and breaking open microvesicles. Disruption of cells may be achieved by using freeze-thawing and/or sonication. In some embodiments, a tissue sample is evaluated. A tissue sample can be evaluated using multiple free-thaw cycles, e.g., 2, 3, 4, 5, or more, which are performed before the sonication step to ensure that microvesicles are broken open.

[0412] Samples that can be evaluated by the assays described herein include, e.g., brain, liver, kidney, lung, spleen, plasma, serum, cerebrospinal fluid (CSF), and urine. In some embodiments, CSF samples from a patient receiving a fusion protein comprising a progranulin polypeptide or a variant thereof as described herein may be evaluated.

### XII. Bis(Monoacylglycero)Phosphate (Bmp)

[0413] Provided herein are methods of monitoring the levels of progranulin (e.g., in a sample, in a cell, in a tissue, and/or in a subject), wherein determining the level of progranulin comprises measuring the abundance of bis(monoacylglycero)phosphate (BMP) (e.g., in the sample, cell, tissue, and/or subject).

[0414] In some embodiments of methods of the present disclosure, the abundance of a single BMP species is measured. In some embodiments, the abundance of two or more BMP species is measured. In some embodiments, the abundance of at least two, three, four, five, or more of the BMP species in Table 3 is measured. When the abundance of two or more BMP species is measured, any combination of different BMP species can be used.

[0415] In some embodiments, the abundance of more than one BMP species can be summed, and the total abundance will be compared to a reference value. For example, the abundance of each of 1, 2, 3, 4, 5, 6, 7, 8, 9, 10, 11, 12, 13, 14, 15, 16, 17, 18, 19, 20, 21, 22, 23, 24, 25, 26, 27, 28, 29, 30, 31, 32, 33, 34, 35, 36, 37, 38, 39, 40, 41, 42, 43, 44, 45, 46, 47, 48, 49, 50, 51, 52, 53, 54, 55, 56, 57, 58, 59, 60, 61, 62, 63, 64, 65, 66, 67, 68, 69, 70, 71, 72, 73, 74, 75, 76, 77, 78, 79, 80, 81, 82, 83, 84, 85, 86, 87, 88, 89, 90, 91, 92, 93, 94, 95, 96, 97, 98, 99, 100, 101, 102, 103, 104, 105, 106, 107, 108, 109, 110, 111, 112, 113, 114, 115, 116, 117, 118, 119, 120, 121, 122, 123, 124, 125, 126, 127, 128, 129, 130, 131, 132, 133, 134, 135, 136, 137, 138, 139, 140, 141, 142, 143, 144, 145, 146, 147, or more BMP species (e.g., the BMP species listed in Table 3) can be summed, and the total abundance then compared to a reference value.

[0416] In some cases, one or more BMP species may be differentially expressed (e.g., more or less abundant) in one type of sample when compared to another, such as, for example, cell-based samples (e.g., cultured cells) versus tissue-based or blood samples. Accordingly, in some embodiments, the selection of the one or more BMP species (i.e., for the measurement of abundance) depends on the type of sample. In some embodiments, the one or more BMP species comprise BMP(18:1_18:1), e.g., when a sample (e.g., a test sample and/or a reference sample) is bone marrow-derived macrophage (BMDM). In other embodiments, the one or more BMP species comprise BMP(22:6_22:6), e.g., when a sample comprises tissue (e.g., brain tissue, liver tissue) or plasma, urine, or CSF.

[0417] In some embodiments, an internal BMP standard (e.g., BMP(14:0_14:0)) is used to measure the abundance of one or more BMP species in a sample and/or determine a reference value (e.g., measure the abundance of one or more BMP species in a reference sample). For example, a known amount of the internal BMP standard can be added to a sample (e.g., a test sample and/or a reference sample) to serve as a calibration point such that the amount of one or more BMP species that are present in the sample can be determined. In some embodiments, a reagent used in the extraction or isolation of BMP from a sample (e.g., methanol) is “spiked” with the internal BMP standard. Typically, the internal BMP standard will be one that does not naturally occur in the subject.

### XIII. Identification of Subjects Having, or at Risk of Having, a Progranulin-Associated Disorder

[0418] In some embodiments, a subject (e.g., a target subject) is determined to have a progranulin-associated disorder or a decreased level of progranulin when the abundance of at least one (e.g., a at least 1, 2, 3, 4, 5, 10, 15, 20, 25, 30, 35, 40, 45, 50, 55, 60, 65, 70, 75, 80, 85, 90, 95, 100, 105, 110, 115, 120, 125, 130, 135, 140, 145, or more) BMP species (e.g., the BMP species listed in Table 3) in a test sample is higher when the test sample is a BMDM or lower when the test sample is liver, brain, cerebrospinal fluid, plasma, or urine than a reference value of a corresponding cell, tissue, or fluid of a healthy control or a control not related to a progranulin-associated disorder.

[0419] In some embodiments, a subject (e.g., a target subject) is determined to have a progranulin-associated disorder or a decreased level of progranulin when the abundance of at least one (e.g., 1, 2, 3, 4, 5, 6, 7, 8, 9, 10, 11, 12, 13, 14, 15, 16, 17, 18, 19, 20, 21, 22, or all 23) of the BMP species selected from the group consisting of BMP(16:0_18:1), BMP(16:0_18:2), BMP(18:0_18:0), BMP(18:0_18:1), BMP(18:1_18:1), BMP(16:0_20:3), BMP(18:1_20:2), BMP(18:0_20:4), BMP(16:0_22:5), BMP(20:4_20:4), BMP(22:6_22:6), BMP(20:4_20:5), BMP(18:2_18:2), BMP(16:0_20:4), BMP(18:0_18:2), BMP(18:0e_22:6), BMP(18:1e_20:4), BMP(20:4_22:6), BMP(18:0e_20:4), BMP(18:2_20:4), BMP(18:1_22:6), BMP(18:1_20:4), BMP(18:0_22:6), and BMP(18:3_22:5) is elevated in BMDM or decreased in liver, brain, cerebrospinal fluid, plasma, or urine compared to a reference value of a corresponding cell, tissue, or fluid of a healthy control or a control not related to a progranulin-associated disorder.

[0420] In some embodiments, a subject (e.g., a target subject) is determined to have a progranulin-associated disorder or a decreased level of progranulin when the abundance of at least one (e.g., 1, 2, 3, 4, 5, 6, 7, or all 8) of the BMP species selected from the group consisting of BMP(18:1_18:1), BMP(18:0_20:4), BMP(20:4_20:4), BMP(22:6_22:6), BMP(20:4_22:6), BMP(18:1_22:6), BMP(18:1_20:4), BMP(18:0_22:6) and BMP(18:3_22:5) is elevated in BMDM or decreased in liver, brain, cerebrospinal fluid, plasma, or urine compared to a reference value of a corresponding cell, tissue, or fluid of a healthy control or a control not related to a progranulin-associated disorder.

[0421] In some embodiments, a subject is determined to have a progranulin-associated disorder or a decreased level of progranulin when BMP(18:1_18:1) levels are elevated in BMDM compared to a reference value of a healthy control or a control not related to a progranulin-associated disorder. In other embodiments, a subject is determined to have a progranulin-associated disorder or a decreased level of progranulin when BMP(22:6_22:6) are decreased in plasma, urine, cerebrospinal fluid (CSF), and/or brain or liver tissue compared to a reference value of a healthy control or a control not related to a progranulin-associated disorder. In other embodiments, a subject is determined to have a progranulin-associated disorder or a decreased level of progranulin when BMP(22:6_22:6) and/or BMP(18:3_22:5) levels are decreased in liver tissue. In other embodiments, a subject is determined to have a progranulin-associated disorder or a decreased level of progranulin when BMP(18:3_22:5) levels are decreased in microglia.

[0422] In some embodiments, a subject (e.g., a target subject) is determined to have a progranulin-associated disorder or a decreased level of progranulin when the abundance of at least one of the BMP species (e.g., measured in a test sample) is at least about 1.1-fold (e.g., about 1.1-fold, 1.2-fold, 1.3-fold, 1.4-fold, 1.5-fold, 2-fold, 2.5-fold, 3-fold, 3.5-fold, 4-fold, 4.5-fold, 5-fold, 5.5-fold, 6-fold, 6.5-fold, 7-fold, 7.5-fold, 8-fold, 8.5-fold, 9-fold, 9.5-fold, 10-fold, or more) higher in BMDM or lower in liver, brain, cerebrospinal fluid, plasma, or urine compared to a reference value of a corresponding cell, tissue, or fluid of a healthy control or a control not related to a progranulin-associated disorder.

[0423] In some embodiments, a subject (e.g., a target subject) is determined to have a progranulin-associated disorder or a decreased level of progranulin when the abundance of at least one of the BMP species (e.g., measured in a test sample) is at least about 1.2-fold to about 4-fold (e.g., at least about 1.2-fold, 1.3-fold, 1.4-fold, 1.5-fold, 1.6-fold, 1.7-fold, 1.8-fold, 1.9-fold, 2-fold, 2.1-fold, 2.2-fold, 2.3-fold, 2.4-fold, 2.5-fold, 2.6-fold, 2.7-fold, 2.8-fold, 2.9-fold, 3-fold, 3.1-fold, 3.2-fold, 3.3-fold, 3.4-fold, 3.5-fold, 3.6-fold, 3.7-fold, 3.8-fold, 3.9-fold, or 4-fold) higher than a reference value (e.g., a corresponding reference value). In some embodiments, a subject is determined to have a progranulin-associated disorder or a decreased level of progranulin when the abundance of at least one of the BMP species is about 2-fold to about 3-fold (e.g., about 2-fold, 2.1-fold, 2.2-fold, 2.3-fold, 2.4-fold, 2.5-fold, 2.6-fold, 2.7-fold, 2.8-fold, 2.9-fold, or 3-fold) higher in BMDM or lower in liver, brain, cerebrospinal fluid, plasma, or urine compared to a reference value of a corresponding cell, tissue, or fluid of a healthy control or a control not related to a progranulin-associated disorder.

### XIV. Monitoring Response to Treatment

[0424] In one aspect, the present disclosure provides methods for monitoring progranulin levels in a subject (e.g., a target subject). In another aspects, provided are methods for monitoring a subject's response to a compound, pharmaceutical composition, or dosing regimen thereof or response to any therapy or therapeutic (e.g., response to a Fc dimer:PGRN fusion protein described herein) for treating a progranulin-associated disorder.

[0425] Typically, the abundance of each of the one or more BMP species in a test sample will be compared to one or more reference values (e.g., a corresponding reference value). In some embodiments, a BMP value is measured before treatment and at one or more time points after treatment. The abundance value taken at a later time point can be compared to the value prior to treatment as well as to a control value, such as that of a healthy or diseased control, to determine how the subject is responding to the therapy. The one or more reference values can be from different cells, tissues, or fluids corresponding to the cell, tissue, or fluid of the test sample.

[0426] In some embodiments, the reference value is the abundance of the one or more BMP species that is measured in a reference sample. The reference value can be a measured abundance value (e.g., abundance value measured in the reference sample), or can be derived or extrapolated from a measured abundance value. In some embodiments, the reference value is a range of values, e.g., when the reference values are obtained from a plurality of samples or a population of subjects. Furthermore, the reference value can be presented as a single value (e.g., a measured abundance value, a mean value, or a median value) or a range of values, with or without a standard deviation or standard of error.

[0427] When two or more test samples are obtained (e.g., from a subject), the time points at which they are obtained can be separated by about 1, 2, 3, 4, 5, 6, 7, 8, 9, 10, 11, 12, 13, 14, 15, 16, 17, 18, 19, 20, 21, 22, 23, 24, 25, 26, 27, 28, 29, 30, 31, 32, 33, 34, 35, 36, 37, 38, 39, 40, 41, 42, 43, 44, 45, 46, 47, 48, 49, 50, 51, 52, 53, 54, 55, 56, 57, 58, 59, 60, or more minutes; about 1, 2, 3, 4, 5, 6, 7, 8, 9, 10, 11, 12, 13, 14, 15, 16, 17, 18, 19, 20, 21, 22, 23, 24, or more hours; about 1, 2, 3, 4, 5, 6, 7, or more days; about 1, 2, 3, 4, 5, 6, 7, 8, 9, 10, or more weeks; or even longer. When three or more test samples are obtained, the time intervals between when each test sample is obtained can all be the same, the intervals can all be different, or a combination thereof.

[0428] In some embodiments, both the first test sample and the second test sample are obtained from a subject (e.g., a target subject) after the subject has been treated, i.e., the first test sample is obtained from the subject at an earlier time point during treatment than the second test sample. In some embodiments, the first test sample is obtained before the subject has been treated for the disorder associated with a decreased level of progranulin (i.e., a pre-treatment test sample) and the second test sample is obtained after the subject has been treated for the disorder associated with a decreased level of progranulin (i.e., a post-treatment test sample). In some embodiments, more than one (e.g., 1, 2, 3, 4, 5, 6, 7, 8, 9, 10, or more) pre-treatment and/or post-treatment test samples are obtained from the subject. Furthermore, the number of pre-treatment and post-treatment test samples that are obtained need not be the same.

[0429] In some embodiments, it may be determined that the subject is not responding to the treatment when the abundance the BMP species measured is within about 1%, 2%, 3%, 4%, 5%, 6%, 7%, 8%, 9%, 10%, 11%, 12%, 13%, 14%, 15%, 16%, 17%, 18%, 19%, or 20% of the reference value.

[0430] When a subject (e.g., a target subject) is not responding to treatment (e.g., for a disorder associated with a decreased level of progranulin), in some embodiments, the dosage of one or more therapeutic agents (e.g., progranulin) is altered (e.g., increased) and/or the dosing interval is altered (e.g., the time between doses is decreased). In some embodiments, when a subject is not responding to treatment, a different therapeutic agent is selected. In some embodiments, when a subject is not responding to treatment, one or more therapeutic agents is discontinued.

### XV. Bmp Detection Techniques

[0431] In some embodiments, antibodies can be used to detect and/or measure the abundance of one or more BMP species. BMP species bound to the antibody can be detected such as by microscopy or enzyme-linked immunosorbent assay (ELISA).

[0432] In other embodiments, mass spectrometry (MS) is used to detect and/or measure the abundance of one or more BMP species according to methods of the present disclosure. Mass spectrometry is a technique in which compounds are ionized, and the resulting ions are sorted by their mass-to-charge ratios (abbreviated m/Q, m/q, m/Z, or m/z). A sample (e.g., comprising a BMP molecule), which can be present in gas, liquid, or solid form, is ionized, and the resulting ions are then accelerated through an electric and/or magnetic field, causing them to be separated by their mass-to-charge ratios. The ions ultimately strike an ion detector and a mass spectrogram is generated. The mass-to-charge ratios of the detected ions, together with their relative abundance, can be used to identify the parent compound(s), sometimes by correlating known masses (e.g., of entire or intact molecules) to the masses of the detected ions and/or by recognition of patterns that are detected in the mass spectrogram.

[0433] Mass spectrometers typically include at least four primary components: (1) a sample inlet device (e.g., a vaporizer), (2) an ionization device, (3) an ion path, and (4) an ion detector. In addition, mass spectrometers commonly comprise a device that converts samples into a form suitable for the inlet device and/or separates compounds that are present within the sample, which in some embodiments can be a chromatography device (e.g., liquid or gas chromatography) or a solid target for matrix-assisted laser desorption/ionization (MALDI) or another technique suitable for solid samples. Mass spectrometers also commonly comprise a device for signal processing of detector signals (e.g., an analog-digital converter (ADC)) and/or software for the processing, analysis, and display of detector signals.

[0434] The sample inlet device facilitates the transition of a solid or liquid specimen into the gaseous phase, which is required for subsequent processing and analysis. The ionization device can utilize, for example, hard ionization (e.g., electron ionization) or soft ionization (e.g., fast atom bombardment (FAB), chemical ionization (CI), electrospray ionization (ESI), MALDI, or atmospheric-pressure chemical ionization (APCI)). ESI methods comprise passing a solution through a length of capillary tube, to the end of which is applied a high positive or negative electric potential. Solution reaching the end of the tube is vaporized into a jet or spray comprising very small droplets of solution in solvent vapor. This spray of droplets flows through an evaporation chamber that is heated slightly to prevent condensation and to evaporate solvent. As the droplets get smaller, the electrical surface charge density increases until the natural repulsion between like charges causes ions as well as neutral molecules to be released.

[0435] In the ion path, ions transition from a near atmospheric pressure environment to the low pressure (e.g., high vacuum) environment of the mass analyzer, which separates the ions according to their mass-to-charge ratios, and are moved towards the ion detector. The ion detector is commonly an electron multiplier or a microchannel plate that releases a cascade of electrons in response to being struck by an ion.

[0436] Different types of mass analyzers can be used, examples of which include sector field mass analyzers, time-of-flight (TOF) mass analyzers, and quadrupole mass analyzers. Sector field mass analyzers use a static electric and/or magnetic field to modify the ion path and/or velocity, effectively bending the trajectories of the ions according to their mass-to-charge ratios. Ions with higher charges and/or lower masses will be deflected more than ions with lower charges and/or higher masses. A TOF mass analyzer uses an electric field to accelerate the ions through a specified potential, and the time that an ion takes to strike the detector is measured. If all of the ions have the same charge, then their velocities will only differ as a function of their masses, and ions with lower masses will strike the detector first. Quadrupole mass analyzers employ one or more sets of four parallel rods (a set of four parallel rods being known as a quadrupole) to generate oscillating electrical fields that stabilize or destabilize the paths of ions as they pass through an electric quadrupole field (e.g., radio frequency (RF) quadrupole file) that is created between the four rods. In particular, only ions within a specific range of mass-to-charge ratios are allowed to pass though the mass analyzer at any given time. However, by varying the potentials on the rods, a wide range of mass-to-charge ratios can be swept rapidly. Mass-to-charge ratios can be swept either continuously or by specifying discrete jumps.

[0437] As opposed to single mass spectrometry (MS) that uses a single mass analyzer (e.g., quadrupole), tandem mass spectrometry (MS/MS) uses a series of mass analyzers (e.g., three mass analyzers) to perform multiple rounds of mass spectrometry, typically having a molecule fragmentation step in between. As a non-limiting example, MS/MS instruments commonly employ three quadrupole mass analyzers. The first quadrupole (Q1) can act as a first mass filter, separating a species or protein of interest from a larger heterogeneous population. The second quadruple (Q2) can act as a collision chamber that stabilizes the ions that have passed through Q1 and can be filled with a low-pressure gas, with which the ions collide, causing them to fragment (collision-induced-fragmentation (CID)). The third quadrupole (Q3) can act as a second mass filter that separates the fragments produced in Q2 and passes them along to the detector. Alternatively, instead of performing tandem mass spectrometry in space, tandem mass spectrometry can be performed over time using a single mass analyzer, such as when a quadrupole ion trap is used and the field is varied over time. Briefly, a quadrupole ion trap works based on the same physical principles as a quadrupole mass analyzer, but the ions are trapped within the quadrupole (i.e., the electric field changes faster than the time required for the ions to escape) and are selectively ejected over time by varying the field generated by the quadrupole.

[0438] Several methods can be used for fragmentation, including but not limited to CID, electron capture dissociation (ECD), electron transfer dissociation (ETD), infrared multiphoton dissociation (IRMPD), blackbody infrared radiative dissociation (BIRD), electron-detachment dissociation (EDD), and surface-induced dissociation (SID).

[0439] Tandem mass spectrometers can be used to run different types of experiments, including full scans, product ion scans, precursor ion scans, neutral loss scans, and selective (or multiple) reaction monitoring (SRM or MRM) scans. In a full scan experiment, the entire mass range or a portion thereof) of both mass analyzers (e.g., Q1 and Q3) are scanned and the second mass analyzer (e.g., Q2) does not contain any collision gas. This allows all ions contained in a sample to be detected. In a product ion scan experiment, a specific mass-to-charge ratio is selected for the first mass analyzer (e.g., Q1), the second mass analyzer (e.g., Q2) is filled with a collision gas to fragment ions having the selected mass-to-charge ratio, and then the entire mass range (or a portion thereof) of the third mass analyzer (e.g., Q3) is scanned. This allows all fragment ions of a selected precursor ion to be detected. In a precursor ion scan experiment, the entire mass range (or a portion thereof) of the first mass analyzer (e.g., Q1) is scanned, the second mass analyzer (e.g., Q2) is filled with collision gas to fragment ions falling within the scan range, and a specific mass-to-charge ratio is selected for the third mass analyzer (e.g., Q3). By correlating the time between detection of a product ion and the particular mass-to-charge ratio that was selected just prior to its detection, this type of experiment can allow a user to determine which precursor ion(s) may have generated the product ion of interest. In a neutral loss scan experiment, the entire mass range (or a portion thereof) of the first mass analyzer (e.g., Q1) is scanned, the second mass analyzer (e.g., Q2) is filled with collision gas to fragment all ions within the scan range, and the third mass analyzer (e.g., Q3) is scanned across a specified range that corresponds to the fragmentation-induced loss of a single specific mass that has occurred for every potential ion in the precursor scan range. This type of experiment permits the identification of all precursors that have lost a particular chemical group of interest (e.g., a methyl group) in common. In an MRM experiment, one specific mass-to-charge ratio is selected for the first mass analyzer (e.g., Q1), the second mass analyzer (e.g., Q2) is filled with collision gas, and the third mass analyzer (e.g., Q3) is set for another specific mass-to-charge ratio. This type of experiment permits the highly specific detection of molecules that are known to fragment into the products that are selected for in the third mass analyzer. MS and MS/MS methods are described further in Grebe et al. Clin. Biochem. Rev. (2011) 32:5-31, hereby incorporated by reference in its entirety for all purposes.

[0440] Furthermore, MS and MS/MS techniques can be coupled with liquid chromatography (LC) or gas chromatography (GC) techniques. Such liquid chromatography-mass spectrometry (LC-MS), liquid chromatography-tandem mass spectrometry (LC-MS/MS), gas chromatography-mass spectrometry (GC-MS), and gas chromatography-tandem mass spectrometry (GC-MS/MS) methods allow for enhanced mass resolving and mass determining over what is typically possible with MS or MS/MS alone.

[0441] Liquid chromatography refers to a process in which one or more components of a fluid solution are selectively retarded as the fluid uniformly percolates through a column of a finely divided substance, or through capillary passageways. The retardation results from the distribution of the components of the mixture between one or more stationary phases and the bulk fluid (i.e., mobile phase), as the fluid moves relative to the stationary phase(s). High performance liquid chromatography (HPLC), also sometimes known as “high pressure liquid chromatography,” is a variant of LC in which the degree of separation is increased by forcing the mobile phase under pressure through a stationary phase, typically a densely packed column.

[0442] Furthermore, ultra high performance liquid chromatography (UHPLC), also known as “ultra high pressure liquid chromatography,” or “ultra performance liquid chromatography (UPLC),” is a variant of HPLC that is performed using much higher pressures than traditional HPLC techniques.

[0443] In some embodiments, the size of particles in the column is less than about 2.0 μm (e.g., about 1.9 μm, 1.8 μm, 1.7 μm, 1.6 μm, 1.5 μm, or smaller). In some embodiments, the particle size is about 1.7 μm.

[0444] In some embodiments, the working pressure on the column is about 400 bar to about 1,000 bar (e.g., about 400, 450, 500, 550, 600, 650, 700, 750, 800, 850, 900, 950, or 1,000 bar).

[0445] In some embodiments, during chromatography the temperature of the column is maintained at a temperature between about 40° C. and about 60° C. (e.g., about 40° C., 41° C., 42° C., 43° C., 44° C., 45° C., 46° C., 47° C., 48° C., 49° C., 50° C., 51° C., 52° C., 53° C., 54° C., 55° C., 56° C., 57° C., 58° C., 59° C., or 60° C.). In some embodiments, the column is maintained at a temperature of about 55° C.

[0446] In some embodiments, the flow rate of the column is between about 0.10 mL/minute and about 0.50 mL/minute (e.g., about 0.10 mL/minute, 0.11 mL/minute, 0.12 mL/minute, 0.13 mL/minute, 0.14 mL/minute, 0.15 mL/minute, 0.16 mL/minute, 0.17 mL/minute, 0.18 mL/minute, 0.19 mL/minute, 0.20 mL/minute, 0.21 mL/minute, 0.22 mL/minute, 0.23 mL/minute, 0.24 mL/minute, 0.25 mL/minute, 0.26 mL/minute, 0.27 mL/minute, 0.28 mL/minute, 0.29 mL/minute, 0.30 mL/minute, 0.31 mb/minute, 0.32 mL/minute, 0.33 mL/minute, 0.34 mL/minute, 0.35 mL/minute, 0.36 mL/minute, 0.37 mL/minute, 0.38 mL/minute, 0.39 mL/minute, 0.40 mb/minute, 0.41 mb/minute, 0.42 mL/minute, 0.43 mL/minute, 0.44 mL/minute, 0.45 mL/minute, 0.46 mb/minute, 0.47 mL/minute, 0.48 mL/minute, 0.49 mL/minute, or 0.50 mb/minute). In some embodiments, the flow rate is about 0.40 mL/minute.

[0447] The gradient elution can be made using two solvents (e.g., A and B solvents). In some embodiments, the A solvent is 10 mM ammonium formate+0.1% formic acid in water and the B solvent is acetonitrile with 0.1% formic acid. In some embodiments, the gradient is produced by the following method: 5% A and 95% B for 1 minute, changed to 50% A and 50% B over 6 minutes, changed to 5% A and 95% B over 0.1 minutes, then maintained at 5% A and 95% B for 4.9 minutes. Once the compounds are separated by LC, HPLC, or UHPLC, they may be introduced into the mass spectrometer.

[0448] Gas chromatography refers to a method for separating and/or analyzing compounds that can be vaporized without being decomposed. The mobile phase is a carrier gas that is typically an inert gas (e.g., helium) or an unreactive gas (e.g., nitrogen), and the stationary phase is typically a microscopic liquid or polymer layer positioned on an inert solid support inside glass or metal tubing that serves as the “column.” As the gaseous compounds of interest interact with the stationary phase within the column, they are differentially retarded and eluted from the column at different times. The separated compounds can then be introduced into the mass spectrometer.

[0449] In some embodiments, antibody-based methods are used to detect and/or measure the abundance of one or more BMP species. Non-limiting examples of suitable methods include enzyme-linked immunosorbent assay (ELISA), immunofluorescence, and radioimmunoassay (RIA) techniques. Methods for performing ELISA, immunofluorescence, and RIA techniques are known in the art.

[0450] Any number of sample types can be used as a test sample and/or reference sample in methods of the present disclosure so long as the sample comprises BMP in an amount sufficient for detection such that the abundance can be measured. Non-limiting examples include cells, tissues, blood (e.g., whole blood, plasma, serum), fluids (e.g., cerebrospinal fluid, urine, bronchioalveolar lavage fluid, lymph, semen, breast milk, amniotic fluid), feces, sputum, or any combination thereof. Non-limiting examples of suitable cell types include bone marrow-derived macrophages (BMDMs), blood cells (e.g., peripheral blood mononuclear cells (PBMCs), erythrocytes, leukocytes), neural cells (e.g., brain cells, cerebral cortex cells, spinal cord cells), bone marrow cells, liver cells, kidney cells, splenic cells, lung cells, eye cells (e.g., retinal cells such as retinal pigmented epithelial (RPE) cells), chorionic villus cells, muscle cells, skin cells, fibroblasts, heart cells, lymph node cells, or a combination thereof. In some embodiments, the sample comprises a portion of a cell. In some embodiments, the sample is purified from a cell or a tissue. Non-limiting examples of purified samples include endosomes, lysosomes, extracellular vesicles (e.g., exosomes, microvesicles), and combinations thereof.

[0451] In some embodiments, the sample (e.g., test sample and/or reference sample) comprises a cell that is a cultured cell. Non-limiting examples include BMDMs and RPE cells. BMDMs can be obtained, for example, by procuring a sample comprising PBMCs and culturing the monocytes contained therein.

[0452] Non-limiting examples of suitable tissue sample types include neural tissue (e.g., brain tissue, cerebral cortex tissue, spinal cord tissue), liver tissue, kidney tissue, muscle tissue, heart tissue, eye tissue (e.g., retinal tissue), lymph nodes, bone marrow, skin tissue, blood vessel tissue, lung tissue, spleen tissue, valvular tissue, and a combination thereof. In some embodiments, a test sample and/or a reference sample comprises brain tissue or liver tissue. In some embodiments, a test and/or a reference sample comprises plasma.

### XVI. Nucleic Acids, Vectors, and Host Cells

[0453] Polypeptide chains contained in the fusion proteins as described herein are typically prepared using recombinant methods. Accordingly, in some aspects, the disclosure provides isolated nucleic acids comprising a nucleic acid sequence encoding any of the polypeptide chains comprising Fc polypeptides as described herein, and host cells into which the nucleic acids are introduced that are used to replicate the polypeptide-encoding nucleic acids and/or to express the polypeptides. In some embodiments, the host cell is eukaryotic, e.g., a human cell.

[0454] In another aspect, polynucleotides are provided that comprise a nucleotide sequence that encodes the polypeptide chains described herein. The polynucleotides may be single-stranded or double-stranded. In some embodiments, the polynucleotide is DNA. In particular embodiments, the polynucleotide is cDNA. In some embodiments, the polynucleotide is RNA.

[0455] The disclosure provides an isolated nucleic acid comprising a nucleic acid sequence encoding a polypeptide having the sequence of any one of SEQ ID NOS: 110, 210, 213-215, 225, 227, 261, 273-275, 282, 284, 285, and 291.

[0456] The disclosure provides an isolated nucleic acid comprising a nucleic acid sequence encoding a polypeptide having the sequence of SEQ ID NO:215.

[0457] The disclosure provides an isolated nucleic acid comprising a nucleic acid sequence encoding a polypeptide having the sequence of SEQ ID NO:210.

[0458] The disclosure provides an isolated nucleic acid comprising a nucleic acid sequence encoding a polypeptide having the sequence of SEQ ID NO:227.

[0459] The disclosure provides an isolated nucleic acid comprising a nucleic acid sequence encoding a polypeptide having the sequence of SEQ ID NO:291.

[0460] The disclosure provides isolated nucleic acids comprising (a) a nucleic acid sequence encoding a polypeptide having the sequence of SEQ ID NO:215, and (b) a nucleic acid sequence encoding a polypeptide having the sequence of SEQ ID NO:210.

[0461] The disclosure provides isolated nucleic acids comprising (a) a nucleic acid sequence encoding a polypeptide having the sequence of SEQ ID NO:227, and (b) a nucleic acid sequence encoding a polypeptide having the sequence of SEQ ID NO:210.

[0462] The disclosure provides isolated nucleic acids comprising (a) a nucleic acid sequence encoding a polypeptide having the sequence of SEQ ID NO:215, and (b) a nucleic acid sequence encoding a polypeptide having the sequence of SEQ ID NO:291.

[0463] The disclosure provides isolated nucleic acids comprising (a) a nucleic acid sequence encoding a polypeptide having the sequence of SEQ ID NO:227, and (b) a nucleic acid sequence encoding a polypeptide having the sequence of SEQ ID NO:291.

[0464] In some embodiments, the polynucleotide is included within a nucleic acid construct. In some embodiments, the construct is a replicable vector. In some embodiments, the vector is selected from a plasmid, a viral vector, a phagemid, a yeast chromosomal vector, and a non-episomal mammalian vector.

[0465] In some embodiments, the polynucleotide is operably linked to one or more regulatory nucleotide sequences in an expression construct. In one series of embodiments, the nucleic acid expression constructs are adapted for use as a surface expression library. In some embodiments, the library is adapted for surface expression in yeast. In some embodiments, the library is adapted for surface expression in phage. In another series of embodiments, the nucleic acid expression constructs are adapted for expression of the polypeptide in a system that permits isolation of the polypeptide in milligram or gram quantities. In some embodiments, the system is a mammalian cell expression system. In some embodiments, the system is a yeast cell expression system.

[0466] Expression vehicles for production of a recombinant polypeptide include plasmids and other vectors. For instance, suitable vectors include plasmids of the following types: pBR322-derived plasmids, pEMBL-derived plasmids, pEX-derived plasmids, pBTac-derived plasmids, and pUC-derived plasmids for expression in prokaryotic cells, such as E. coli. The pcDNAI/amp, pcDNAI/neo, pRc/CMV, pSV2gpt, pSV2neo, pSV2-dhfr, pTk2, pRSVneo, pMSG, pSVT7, pko-neo, and pHyg-derived vectors are examples of mammalian expression vectors suitable for transfection of eukaryotic cells. Alternatively, derivatives of viruses such as the bovine papilloma virus (BPV-1), or Epstein-Ban-virus (pHEBo, pREP-derived, and p205) can be used for transient expression of polypeptides in eukaryotic cells. In some embodiments, it may be desirable to express the recombinant polypeptide by the use of a baculovirus expression system. Examples of such baculovirus expression systems include pVL-derived vectors (such as pVL1392, pVL1393, and pVL941), pAcUW-derived vectors (such as pAcUW1), and pBlueBac-derived vectors. Additional expression systems include adenoviral, adeno-associated virus, and other viral expression systems.

[0467] Vectors may be transformed into any suitable host cell. In some embodiments, the host cells, e.g., bacteria or yeast cells, may be adapted for use as a surface expression library. In some cells, the vectors are expressed in host cells to express relatively large quantities of the polypeptide. Such host cells include mammalian cells, yeast cells, insect cells, and prokaryotic cells. In some embodiments, the cells are mammalian cells, such as Chinese Hamster Ovary (CHO) cell, baby hamster kidney (BHK) cell, NS0 cell, Y0 cell, HEK293 cell, COS cell, Vero cell, or HeLa cell.

[0468] A host cell transfected with an expression vector encoding one or more Fc polypeptide chains as described herein can be cultured under appropriate conditions to allow expression of the one or more polypeptides to occur. The polypeptides may be secreted and isolated from a mixture of cells and medium containing the polypeptides. Alternatively, the polypeptides may be retained in the cytoplasm or in a membrane fraction and the cells harvested, lysed, and the polypeptide isolated using a desired method.

### XVII. Therapeutic Methods

[0469] A fusion protein in accordance with the disclosure may be used therapeutically to treat progranulin-associated disorders (e.g., a neurodegenerative disease (e.g., FTD, NCL, NPA, NPB, NPC, C9ORF72-associated ALS/FTD, sporadic ALS, AD, Gaucher's disease (e.g., Gaucher's disease types 2 and 3), and Parkinson's disease), atherosclerosis, a disorder associated with TDP-43, and AMD).

[0470] A fusion protein described herein that comprises a progranulin polypeptide or a variant thereof may be administered to a subject at a therapeutically effective amount or dose. Illustrative dosages include a dose range of about 1 mg/kg to about 100 mg/kg, or about 10 mg/kg to about 50 mg/kg, can be used. The dosages, however, may be varied according to several factors, including the dose frequency, the chosen route of administration, the formulation of the composition, patient response, the severity of the condition, the subject's weight, and the judgment of the prescribing physician. The dosage can be increased or decreased over time, as required by an individual patient. In some embodiments, a patient initially is given a low dose, which is then increased to an efficacious dosage tolerable to the patient.

[0471] In various embodiments, a fusion protein described herein is administered parenterally. In some embodiments, the protein is administered intravenously. Intravenous administration can be by infusion, e.g., over a period of from about 10 to about 30 minutes, or over a period of at least 1 hour, 2 hours, or 3 hours. In some embodiments, the protein is administered as an intravenous bolus. Combinations of infusion and bolus administration may also be used.

[0472] In some parenteral embodiments, a fusion protein is administered intraperitoneally, subcutaneously, intradermally, or intramuscularly. In some embodiments, the protein is administered intradermally or intramuscularly. In some embodiments, the protein is administered intrathecally, such as by epidural administration, or intracerebroventricularly.

[0473] In other embodiments, a fusion protein may be administered orally, by pulmonary administration, intranasal administration, intraocular administration, or by topical administration. Pulmonary administration can also be employed, e.g., by use of an inhaler or nebulizer, and formulation with an aerosolizing agent.

### XVIII. Pharmaceutical Compositions and Kits

[0474] In other aspects, pharmaceutical compositions and kits comprising a fusion protein in accordance with the disclosure are provided.

### Pharmaceutical Compositions

[0475] Guidance for preparing formulations for use in the disclosure can be found in any number of handbooks for pharmaceutical preparation and formulation that are known to those of skill in the art.

[0476] In some embodiments, a pharmaceutical composition comprises a fusion protein as described herein and further comprises one or more pharmaceutically acceptable carriers and/or excipients. A pharmaceutically acceptable carrier includes any solvents, dispersion media, or coatings that are physiologically compatible and that do not interfere with or otherwise inhibit the activity of the active agent.

[0477] In some embodiments, the carrier is suitable for intravenous, intrathecal, intraocular, intracerebroventricular, intramuscular, oral, intraperitoneal, transdermal, topical, or subcutaneous administration. Pharmaceutically acceptable carriers can contain one or more physiologically acceptable compounds that act, for example, to stabilize the composition or to increase or decrease the absorption of the polypeptide. Physiologically acceptable compounds can include, for example, carbohydrates, such as glucose, sucrose, or dextrans, antioxidants, such as ascorbic acid or glutathione, chelating agents, low molecular weight proteins, compositions that reduce the clearance or hydrolysis of the active agents, or excipients or other stabilizers and/or buffers. Other pharmaceutically acceptable carriers and their formulations are also available in the art.

[0478] The pharmaceutical compositions described herein can be manufactured, e.g., by means of conventional mixing, dissolving, granulating, dragee-making, emulsifying, encapsulating, entrapping, or lyophilizing processes. The following methods and excipients are exemplary.

[0479] For oral administration, a fusion protein as described herein can be formulated by combining it with pharmaceutically acceptable carriers that are well known in the art. Such carriers enable the compounds (e.g., fusion proteins as described herein) to be formulated as tablets, pills, dragees, capsules, emulsions, lipophilic and hydrophilic suspensions, liquids, gels, syrups, slurries, suspensions and the like, for oral ingestion by a patient to be treated. Pharmaceutical preparations for oral use can be obtained by mixing the fusion proteins with a solid excipient, optionally grinding a resulting mixture, and processing the mixture of granules, after adding suitable auxiliaries, if desired, to obtain tablets or dragee cores. Suitable excipients include, for example, fillers such as sugars, including lactose, sucrose, mannitol, or sorbitol; cellulose preparations such as, for example, maize starch, wheat starch, rice starch, potato starch, gelatin, gum tragacanth, methyl cellulose, hydroxypropylmethyl-cellulose, sodium carboxymethylcellulose, and/or polyvinylpyrrolidone. If desired, disintegrating agents can be added, such as a cross-linked polyvinyl pyrrolidone, agar, or alginic acid or a salt thereof such as sodium alginate.

[0480] As disclosed above, a fusion protein as described herein can be formulated for parenteral administration by injection, e.g., by bolus injection or continuous infusion. For injection, the fusion protein can be formulated into preparations by dissolving, suspending, or emulsifying them in an aqueous or nonaqueous solvent, such as vegetable or other similar oils, synthetic aliphatic acid glycerides, esters of higher aliphatic acids or propylene glycol; and if desired, with conventional additives such as solubilizers, isotonic agents, suspending agents, emulsifying agents, stabilizers, and preservatives. In some embodiments, the fusion protein can be formulated in aqueous solutions, such as physiologically compatible buffers, non-limiting examples of which include Hanks's solution, Ringer's solution, and physiological saline buffer. Formulations for injection can be presented in unit dosage form, e.g., in ampules or in multi-dose containers, with an added preservative. The compositions can take such forms as suspensions, solutions, or emulsions in oily or aqueous vehicles, and can contain formulatory agents such as suspending, stabilizing, and/or dispersing agents.

[0481] In some embodiments, a fusion protein as described herein is prepared for delivery in a sustained-release, controlled release, extended-release, timed-release, or delayed-release formulation, for example, in semi-permeable matrices of solid hydrophobic polymers containing the active agent. Various types of sustained-release materials have been established and are well known by those skilled in the art. Extended-release formulations include film-coated tablets, multiparticulate or pellet systems, matrix technologies using hydrophilic or lipophilic materials and wax-based tablets with pore-forming excipients. Usually, sustained release formulations can be prepared using naturally-occurring or synthetic polymers, for instance, polymeric vinyl pyrrolidones, such as polyvinyl pyrrolidone; carboxyvinyl hydrophilic polymers; hydrophobic and/or hydrophilic hydrocolloids, such as methylcellulose, ethylcellulose, hydroxypropylcellulose, and hydroxypropylmethylcellulose; and carboxypolymethylene.

[0482] Typically, a pharmaceutical composition for use in in vivo administration is sterile. Sterilization can be accomplished according to methods known in the art, e.g., heat sterilization, steam sterilization, sterile filtration, or irradiation.

[0483] Dosages and desired drug concentration of pharmaceutical compositions described herein may vary depending on the particular use envisioned. Suitable dosages are also described in Section XVII above.

### Kits

[0484] In some embodiments, a kit for use in treating a progranulin-associated disorder (e.g., a neurodegenerative disease (e.g., FTD, NCL, NPA, NPB, NPC, C9ORF72-associated ALS/FTD, sporadic ALS, AD, Gaucher's disease (e.g., Gaucher's disease types 2 and 3), and Parkinson's disease), atherosclerosis, a disorder associated with TDP-43, and AMD) comprising a fusion protein as described herein is provided.

[0485] In some embodiments, the kit further comprises one or more additional therapeutic agents. For example, in some embodiments, the kit comprises a fusion protein as described herein and further comprises one or more additional therapeutic agents for use in the treatment of progranulin-associated disorders (e.g., a neurodegenerative disease (e.g., FTD)). In some embodiments, the kit further comprises instructional materials containing directions (i.e., protocols) for the practice of the methods described herein (e.g., instructions for using the kit for administering a fusion protein comprising the progranulin polypeptide across the blood-brain barrier). While the instructional materials typically comprise written or printed materials, they are not limited to such. Any medium capable of storing such instructions and communicating them to an end user is contemplated by this disclosure. Such media include, but are not limited to, electronic storage media (e.g., magnetic discs, tapes, cartridges, chips), optical media (e.g., CD-ROM), and the like. Such media may include addresses to internet sites that provide such instructional materials.

### XIX. Transgenic Animals

[0486] Further, the disclosure also provides non-human transgenic animals that comprise (a) a nucleic acid that encodes a chimeric TfR polypeptide comprising: (i) an apical domain having at least 90% identity to SEQ ID NO:296 and (ii) the transferrin binding site of the native TfR polypeptide of the animal, and (b) a knockout of the GRN gene, and wherein the chimeric TfR polypeptide is expressed in the brain of the animal. The chimeric forms of the transferrin receptor include a non-human (e.g., mouse) mammalian transferrin binding site and an apical domain that is heterologous to the domain containing the transferrin binding site. These chimeric receptors can be expressed in transgenic animals, particularly where the transferrin binding site is derived from the transgenic animal species and where the apical domain is derived from a primate (e.g., human or monkey). The chimeric TfR polypeptide can comprise an amino acid sequence having at least 95% (e.g., 97%, 98%, or 990%) identity to SEQ ID NO:300. Also described herein is a polynucleotide encoding a chimeric transferrin receptor that comprises a non-human mammalian transferrin binding site and an apical domain having an amino acid sequence at least 80%, 90%, 95%, or 98% identical to SEQ ID NO:296. The nucleic acid sequence encoding the apical domain can comprise a nucleic acid sequence having at least 95% (e.g., 97%, 98%, or 99%) identity to SEQ ID NO:301. The transgenic animal can be homozygous or heterozygous for the nucleic acid encoding the chimeric TfR polypeptide. Further, the knockout of the GRN gene can comprise a deletion of exons 1-4 of the GRNgene.

[0487] Methods for generating transgenic knock-in mice have been published in the literature and are well known to those with skill in the art. A method to generate a human TfR knock-in mouse includes pronuclear injection into single cell embryos, in for example C57B16 mice, followed by embryo transfer to pseudo pregnant females. More specifically, Cas9, sgRNAs, and a donor DNA, are introduced into the embryos. The donor DNA encodes the human apical domain coding sequence that has been codon optimized for expression in mouse. The apical domain coding sequence can be flanked with a left and right homology arm. The donor sequence is designed in this manner such that the apical domain is to be inserted after the fourth mouse exon, and is immediately flanked at the 3′ end by the ninth mouse exon. A founder male from the progeny of the female that received the embryos can then be bred to wild-type females to generate F1 heterozygous mice. Homozygous mice can be subsequently generated from breeding of F1 generation heterozygous mice.

[0488] The disclosure also provides a non-human, for example, non-primate, transgenic animal (e.g., a mouse or a rat) expressing such chimeric TfRs and a knockout of the GRNgene and the use of the non-human transgenic animal to screen for polypeptides that can cross the BBB by binding to human transferrin receptor (huTfR) in vivo. In some embodiments, the non-human transgenic animal contains a native transferrin receptor (such as a mouse transferrin receptor (mTfR)), in which the apical domain is replaced with an orthologous apical domain having an amino acid sequence at least 80%, 90%, 95%, or 98% identical to SEQ ID NO:296, thereby leaving the native transferrin binding site and the majority, e.g., at least 70%, or at least 75%, of the sequence encoding the transferrin receptor intact. This non-human transgenic animal thus maximally retains the transferrin-binding functionality of the endogenous transferrin receptor of the non-human animal, including the ability to maintain proper iron homeostasis as well as bind and transport transferrin. As a result, the transgenic animal is healthy and suitable for use in discovery and development of therapeutics for treating brain diseases.

### XX. Examples

[0489] The present disclosure will be described in greater detail byway of specific examples. The following examples are offered for illustrative purposes only, and are not intended to limit the disclosure in any manner. Those of skill in the art will readily recognize a variety of noncritical parameters which can be changed or modified to yield essentially the same results. Efforts have been made to ensure accuracy with respect to numbers used (e.g., amounts, temperatures, etc.), but some experimental error and deviation may be present. The practice of the present disclosure will employ, unless otherwise indicated, conventional methods of protein chemistry, biochemistry, recombinant DNA techniques and pharmacology, within the skill of the art. Such techniques are explained fully in the literature. Additionally, it should be apparent to one of skill in the art that the methods for engineering as applied to certain libraries can also be applied to other libraries described herein.

### Example 1. Recombinant Fc Dimer:PGRN Fusion Protein Expression and Purification

[0490] To express the recombinant Fc dimer:PGRN fusion proteins in Expi293 (Thermo-Fisher), cells were transfected at 2×10⁶ cells/mL density with Expifectamine™ 293/plasmid DNA complex according to manufacturer's instructions (Thermo-Fisher). After transfection, cells were incubated at 37° C. with a humidified atmosphere of 6-8% C02 in an orbital shaker (Infors HT Multitron). On day one post-transfection, Expifectamine™ transfection enhancer 1 and 2 were added to the culture. Media supernatant was harvested by centrifugation after 96-hour post-transfection. The clarified supernatant was supplemented with EDTA-free protease inhibitor (Roche) and was stored at −80° C.

[0491] For recombinant fusion protein isolation, clarified media supernatant was loaded on HiTrap MabSelect SuRe Protein A affinity column (GE Healthcare Life Sciences) and washed with wash buffer I (PBS buffer pH 7.4) and wash buffer II (PBS buffer pH 7.4 and 150 mM NaCl). The fusion protein was eluted in 50 mM QB citrate buffer pH 3.0 with 150 mM NaCl. Immediately after elution, the arginine-succinate buffer (1 M arginine, 685 mM succinic acid pH 5.0) was added to adjust the pH. Protein aggregates were separated from monodispersed fusion proteins by size exclusion chromatography (SEC) on Superdex 200 increase 16/60 GL column (GE Healthcare Life Sciences). The SEC mobile phase was kept in arginine-succinate pH 5.0 buffer. All chromatography steps were performed on AKTA pure or AKTA Avant systems (GE Healthcare Life Sciences).

[0492] FIG. 1A is a schematic drawing showing three Fc dimer:PGRN fusion proteins Fusion 1, Fusion 2, and Fusion 3. In Fusion 1 and Fusion 2, the N-terminus of PGRN is fused to the C-terminus of the Fc polypeptide that does not contain TfR-binding mutations (indicated by star) by way of a (G₄S)₂ linker (SEQ ID NO:276) and a G₄S linker (SEQ ID NO:277), respectively. In Fusion 3, the C-terminus of PGRN is fused to the N-terminus of the Fc polypeptide that does not contain TfR-binding mutations (indicated by star) by way of a (G₄S)₂ linker. FIG. 1B shows that Fusion 1, Fusion 2, and Fusion 3 each containing one PGRN molecule were purified to greater than 85% purity.

[0493] FIG. 1C is a schematic drawing showing the Fc dimer:PGRN fusion protein Fusion 4, Fusion 5, and Fusion 6. In Fusion 4, each of the two PGRN molecules is fused to the C-terminus of an Fc polypeptide by way of the linker (G₄S)₂. One PGRN molecule is fused to C-terminus of the Fc polypeptide containing TfR-binding mutations (indicated by star), while the other PGRN molecule is fused to C-terminus of the Fc polypeptide without the TfR-binding III mutations. In Fusion 5, one PGRN molecule is fused to the N-terminus of the Fc polypeptide containing TfR-binding mutations (indicated by star) by way of the linker (G₄S)₂, while the other PGRN molecule is fused to the C-terminus of the other Fc polypeptide without the TfR-binding mutations. In Fusion 6, each of the two PGRN molecules is fused to the N-terminus of an Fc polypeptide by way of the linker (G₄S)₂. One PGRN molecule is fused to N-terminus of the Fc polypeptide containing TfR-binding mutations (indicated by star), while the other PGRN molecule is fused to N-terminus of the Fc polypeptide without the TfR-binding mutations. FIG. 1D shows that fusion proteins Fusion 4 and Fusion 5 each containing two PGRN molecules were purified to greater than 85% purity.

[0494] Other Fc dimer:PGRN fusion proteins include Fusion 7 and Fusion 8 (FIG. 1E). Both fusion proteins Fusion 7 and Fusion 8 contain Fc polypeptides that do not contain TfR-binding mutations. In Fusion 7, the N-terminus of PGRN is fused to the C-terminus of an Fc polypeptide by way of the linker (G₄S)₂. In Fusion 8, the C-terminus of PGRN is fused to the N-terminus of an Fc polypeptide by way of the linker (G₄S)₂. Additional Fc dimer:PGRN fusion proteins are described in Table 1 below, which lists the sequences for each fusion protein.

TABLE 1
Sequences of Fc Dimer: PGRN

| Fc | | Fc Polypeptide or Fc Polypeptide and |
|---|---|---|
| Dimer: PGRN | Fc Polypeptide and PGRN | PGRN |
| Fusion 1 | Partial hinge-Fc polypeptide with hole | Partial hinge-Fc polypeptide with TfR- |
| | mutations-(G₄S)₂-PGRN: SEQ ID NO: 213 | binding (CH3C.35.21.17) and knob |
| | | mutation: SEQ ID NO: 273 |
| Fusion 2 | Partial hinge-Fc polypeptide with hole | Partial hinge-Fc polypeptide with TfR- |
| | mutations-G₄S-PGRN: SEQ ID NO: 214 | binding (CH3C.35.21.17) and knob |
| | | mutation: SEQ ID NO: 273 |
| Fusion 3 | PGRN-(G₄S)₂-Partial hinge-Fc polypeptide | Partial hinge-Fc polypeptide with TfR- |
| | with hole mutations: SEQ ID NO: 225 | binding (CH3C.35.21.17) and knob |
| | | mutation: SEQ ID NO: 273 |
| Fusion 4 | Partial hinge-Fc polypeptide with hole | Partial hinge-Fc polypeptide with TfR- |
| | mutations-(G₄S)₂-PGRN: SEQ ID NO: 213 | binding (CH3C.35.21.17) and knob |
| | | mutation-(G₄S)₂-PGRN: SEQ ID NO: 274 |
| Fusion 5 | Partial hinge-Fc polypeptide with hole | PGRN-(G₄S)₂-Partial hinge-Fc polypeptide |
| | mutations-(G₄S)₂-PGRN: SEQ ID NO: 213 | with TfR-binding (CH3C35.21.17) and |
| | | knob mutation: SEQ ID NO: 275 |
| Fusion 6 | PGRN-(G₄S)₂-Partial hinge-Fc polypeptide | PGRN-(G₄S)₂-Partial hinge-Fc polypeptide |
| | with hole mutations: SEQ ID NO: 225 | with TfR-binding (CH3C35.21.17) and |
| | | knob mutation: SEQ ID NO: 275 |
| Fusion 7 | Partial hinge-Fc polypeptide with hole | Partial hinge-Fc polypeptide with knob |
| | mutations-(G₄S)₂-PGRN: SEQ ID NO: 213 | mutation: SEQ ID NO: 261 |
| Fusion 8 | PGRN-(G₄S)₂-Partial hinge-Fc polypeptide | Partial hinge-Fc polypeptide with knob |
| | with hole mutations: SEQ ID NO: 225 | mutation: SEQ ID NO: 261 |
| Fusion 9 | Partial hinge-Fc polypeptide with hole and | Partial hinge-Fc polypeptide with TfR- |
| | LALA mutations-(G₄S)₂-PGRN: SEQ ID | binding (CH3C.35.21) and knob and |
| | NO: 215 | LALA mutations: SEQ ID NO: 110. |
| Fusion 10 | PGRN-(G₄S)₂-Partial hinge-Fc polypeptide | Partial hinge-Fc polypeptide with TfR- |
| | with hole and LALA mutations: SEQ ID | binding (CH3C.35.21) and knob and |
| | NO: 227 | LALA mutations: SEQ ID NO: 110. |
| Fusion 11 | Partial hinge-Fc polypeptide with hole and | Partial hinge-Fc polypeptide with TfR- |
| | LALA mutations-(G₄S)₂-PGRN: SEQ ID | binding (CH3C35.21.17) and knob and |
| | NO: 215 | LALA mutations: SEQ ID NO: 291 |
| Fusion 12 | PGRN-(G₄S)₂-Partial hinge-Fc polypeptide | Partial hinge-Fc polypeptide with TfR- |
| | with hole and LALA mutations: SEQ ID | binding (CH3C35.21.17) and knob and |
| | NO: 227 | LALA mutations: SEQ ID NO: 291 |
| Fusion 13 | Partial hinge-Fc polypeptide with hole and | Partial hinge-Fc polypeptide with TfR- |
| | LALA mutations-(G₄S)₂-PGRN: SEQ ID | binding (CH3C.35.21.17) and knob |
| | NO: 215 | mutation: SEQ ID NO: 273 |
| Fusion 14 | PGRN-(G₄S)₂-Partial hinge-Fc polypeptide | Partial hinge-Fc polypeptide with TfR- |
| | with hole and LALA mutations: SEQ ID | binding (CH3C.35.21.17) and knob |
| | NO: 227 | mutation: SEQ ID NO: 273 |
| Fusion 15 | Partial hinge-Fc polypeptide with hole and | Partial hinge-Fc polypeptide with TfR- |
| | LALA mutations-(G₄S)₂-PGRN: SEQ ID | binding (CH3C35.23.2) and knob and |
| | NO: 215 | LALA mutations: SEQ ID NO: 210 |
| Fusion 16 | PGRN-(G₄S)₂-Partial hinge-Fc polypeptide | Partial hinge-Fc polypeptide with TfR- |
| | with hole and LALA mutations: SEQ ID | binding (CH3C35.23.2) and knob and |
| | NO: 227 | LALA mutations: SEQ ID NO: 210 |
| Fusion 17 | Partial hinge-Fc polypeptide with hole and | Partial hinge-Fc polypeptide with TfR- |
| | LALA mutations-(G₄S)₂-PGRN: SEQ ID | binding (CH3C35.23.2) and knob and |
| | NO: 215 | LALAPG mutations: SEQ ID NO: 282 |
| Fusion 18 | PGRN-(G₄S)₂-Partial hinge-Fc polypeptide | Partial hinge-Fc polypeptide with TfR- |
| | with hole and LALA mutations: SEQ ID | binding (CH3C35.23.2) and knob and |
| | NO: 227 | LALAPG mutations: SEQ ID NO: 282 |
| Fusion 19 | Partial hinge-Fc polypeptide with hole and | Partial hinge-Fc polypeptide with TfR- |
| | LALA mutations-(G₄S)₂-PGRN: SEQ ID | binding (CH3C35.23.2) and knob, LALA, |
| | NO: 215 | and LS mutations: SEQ ID NO: 284 |
| Fusion 20 | PGRN-(G₄S)₂-Partial hinge-Fc polypeptide | Partial hinge-Fc polypeptide with TfR- |
| | with hole and LALA mutations: SEQ ID | binding (CH3C35.23.2) and knob, LALA, |
| | NO: 227 | and LS mutations: SEQ ID NO: 284 |
| Fusion 21 | Partial hinge-Fc polypeptide with hole and | Partial hinge-Fc polypeptide with TfR- |
| | LALA mutations-(G₄S)₂-PGRN: SEQ ID | binding (CH3C35.23.2) and knob, |
| | NO: 215 | LALAPG, and LS mutations: SEQ ID |
| | | NO: 285 |
| Fusion 22 | PGRN-(G₄S)₂-Partial hinge-Fc polypeptide | Partial hinge-Fc polypeptide with TfR- |
| | with hole and LALA mutations: SEQ ID | binding (CH3C35.23.2) and knob, |
| | NO: 227 | LALAPG, and LS mutations: SEQ ID |
| | | NO: 285 |

### Example 2. Recombinant Fc Dimer:PGRN Fusion Protein Binding to MTR and Sortilin

[0495] All surface plasmon resonance (SPR) experiments were performed on a GE Healthcare Biacore 8K instrument with Series S Sensor Chip CM5 and HBS-EP+ running buffer at 25° C. To measure the binding affinity of the fusion proteins for hMR, the sensor chip was immobilized with streptavidin and biotinylated-AviTag-hTfR was captured. Single-cycle kinetics was used with a 3-fold concentration series of fusion protein analyte ranging from 25 nM-2 μM, allowing for 80 seconds of contact time, 180 seconds of dissociation time, and a flow rate of 30 μL/min. A steady-state affinity model was used to demonstrate that the fusion proteins are capable of binding hTfR.

[0496] To measure the binding affinity for sortilin, the fusion proteins were captured using a sensor chip that was immobilized with a GE Healthcare human antibody capture kit. Multi-cycle kinetics was used with a 3-fold concentration series of sortilin analyte ranging from 0.4 nM-100 nM, allowing for 300 seconds of contact time, 600 seconds of dissociation time, and a flow rate of 30 μL/min. A 1:1 kinetics model was used to evaluate the binding kinetics of sortilin binding. The binding affinities of two Fc dimer:PGRN fusion proteins to sortilin are as follows: Fusion 1: 19 nM and Fusion 2: 19 nM, which are similar to the sortilin binding affinity for PGRN reported in literature (about 18 nM). Fusion 3 did not appear to bind sortilin. Fc fusion at C-terminus of PGRN might block the sortilin binding site of PGRN. Alternatively, immobilized Fc used in the Biacore assay might cause steric hinderance for sortilin to access the C-terminus of PGRN.

### Example 3. Cellular Uptake

[0497] Bone marrow derived macrophages (BMDMs) isolated from GRN WT and KO mice were treated for 16 h with 50 nM recombinant progranulin (PGRN) (Adipogen), 50 nM Fc dimer:PGRN fusion proteins, or human PGRN lentivirus. Fixed BMDMs were immunostained with antibodies against human PGRN (R&D Systems) and human Fc (Thermo Fisher Scientific). Cellular uptake was quantified with an Opera Phenix high-content imaging platform (PerkinElmer) in confocal mode. Treatment with recombinant PGRN and full-length Fc dimer:PGRN fusion proteins (Fusion 1, Fusion 2, and Fusion 3) led to robust increase in cellular PGRN, as shown by both PGRN and Fc stainings (FIGS. 2A and 2B), indicating efficient uptake. The granulin E fusion protein (SEQ ID NO:280 (Partial hinge-Fc polypeptide with hole mutations-(G₄S)₂-Granulin E fusion (amino acids 497-593 of SEQ ID NO:211)) dimerized with Fc polypeptide with knob mutations) was used as a negative control.

### Example 4. Proteolysis Assay

### DQ-BSA Assay

[0498] DQ-BSA Red is BSA protein heavily conjugated with BODIPY Red dye. DQ-BSA Red is a fluorogenic substrate (max excitation at 590 nm, emission at 615 nm) for resident proteases of the endo-lysosomal system. Once DQ-BSA is hydrolyzed to smaller dye-labeled peptides inside lysosomes, the strong self-quenching effect conferred by heavy labeling of Bodipy dye is relieved, producing a large increase in fluorescence that is amenable to quantitation by confocal microscopy.

[0499] In experiments, BMDMs isolated from GRN WT and KO mice were treated for 6 h with a final concentration of 10 μg/mL DQ-BSA Red in complete media. This time period allowed for DQ-BSA to be passively loaded into cells by fluid phase endocytosis, leading to its distribution throughout the endo-lysosomal network, and ultimately to its proteolysis in lysosomes.

[0500] After the 6 h treatment was completed, BMDMs were washed three times with PBS and fixed with 4% PFA in PBS for 15 min. To label cellular nuclei for confocal microscopy, fixed BMDMs were treated with 1 μg/mLDAPI (Thermo-Fisher) in PBS for 10 min and imaged on an Opera-Phenix high content imaging platform (PerkinElmer). Unquenched Bodipy-Red signal was measured by excitation at 568 nm and endo-lysosomal proteolysis was quantified by calculating the integrated Bodipy spot area per cell using an automated analysis module built in Harmony software (PerkinElmer).

[0501] GRN WT and KO BMDMs were pre-treated with 50 nM recombinant PGRN (Adipogen), 50 nM Fc dimer:PGRN fusion proteins, or human PGRN lentivirus for 48 h. A quenched fluorogenic Bodipy-BSA conjugate (DQ-BSA Red, Thermo Fisher Scientific) was added to pre-treated BMDMs at a final concentration of 10 μg/mL for 6 h. Unquenched Bodipy-Red signal was measured by excitation at 568 nm using an Opera Phenix high-content imaging platform (PerkinElmer) in confocal mode. Endo-lysosomal proteolysis was quantified by calculating the integrated Bodipy spot area per cell using an automated analysis module built in Harmony software (PerkinElmer). Fc dimer:PGRN fusion proteins showed either complete (Fusion 1) or partial (Fusion 2 and Fusion 3) rescue of impairment of proteolytic deficits in KO BMDMs (FIG. 3). As shown in FIG. 3, the granulin E fusion protein (SEQ ID NO:280 (Partial hinge-Fc polypeptide with hole mutations-(G₄S)₂-Granulin E fusion (amino acids 497-593 of SEQ ID NO:211)) dimerized with Fc polypeptide with knob mutations) failed to rescue proteolysis.

### Example 5. Bodipy-BSA Conjugate Dose-Response

[0502] WT and KO GRN BMDMs were treated for 24 h in a Bodipy-BSA conjugate (DQ-BSA) assay with semi-log dose-titrations (100 nM down to 10 μM) of Fc dimer:PGRN fusion proteins (Fusion 1, Fusion 3, Fusion 4, and Fusion 5). Endo-lysosomal proteolysis was determined as described previously. Fusion 5 showed evidence of enhanced potency in the DQ-BSA (FIG. 4).

### Example 6. Cathepsin D Assay

[0503] A fluorogenic probe was used to measure cathepsin D activity in cellular lysates. GRN WT and KO BMDMs were treated for 72 h with Fc dimer:PGRN fusion proteins at 50 nM, then the cells were lysed in CST lysis buffer. Cell lysate was diluted into the low pH assay buffer and mixed with the fluorogenic probe. Cathepsin D activity was read on a plate reader and calculated as fold over WT untreated. Three fusion proteins (Fusion 1, Fusion 2, and Fusion 3) showed partial rescue of the elevated cathepsin D activity observed in the GRN KO BMDMs (FIG. 5).

### Example 7. Lysosomal Gene Dysregulation

[0504] GRN WT and KO BMDMs were treated for 72 h with Fc dimer:PGRN fusion protein Fusion 1 between 5 nM and 50 nM. Cells were lysed and RNA was extracted using Cell-to-CT kit (Fisher Scientific). mRNA levels of lysosomal genes Cts1, Tmem106b, and Psap were measured by qPCR. Treatment with Fc dimer:PGRN fusion protein Fusion 1 showed partial rescue of the elevation of the lysosomal genes in the GRNKO BMDMs (FIGS. 6B-6D).

### Example 8. Pharmacokinetic Properties of Fusion Proteins in Plasma and Liver

[0505] WT mice were dosed once at 10 mg/kg of Fc dimer:PGRN fusion protein Fusion 1 or Fusion 3, and plasma samples were obtained at the timepoints indicated. Liver was homogenized in CST lysis buffer using bead homogenization. The concentration of each Fc dimer:PGRN fusion protein was measured by ELISA in both plasma and terminal liver samples using an Fc-capture-PGRN-detection architecture. PK profiles indicate similar clearance and half-lives of the two fusion proteins (FIGS. 7A and 7B).

### Example 9. Brain Uptake of Fusion Proteins in hTfR Knock-in Mice

[0506] This study aimed to determine whether the Fc dimer:PGRN fusion proteins (Fusion 1 and Fusion 3) can be detected in the brain of mice expressing hTfR (for a description of the mice, see, e.g., U.S. Pat. No. 10,143,187). The fusion proteins were injected via the tail vein into hTfR knock-in (hTfR.KI)(homozygous) and non-transgenic mice in an effort to determine if human progranulin (hPGRN) can be detected in the brain of hTfR.KI mice and if so, what is the fold increase of hPGRN in the hTfR.KI mice over that in the non-transgenic injected mice lacking the hTfR.

### Materials and Methods

[0507] Animals: The mice used for this study were obtained from JAX Laboratories and consisted of 16 hTfR.KI (homozygous) mice and 10 non-transgenic C57BL/6 males at 8 weeks of age. Animals were housed in standard conditions in the vivarium with ad libitum access to food and water at least 7 days prior to the initiation of the study.

TABLE 2
Study Design/Experimental Groups

| | | Dose | Time points | | Tissue/fluids to be | Material |
|---|---|---|---|---|---|---|
| Genotype | Protein | (mg/kg) | (h) | n/group | collected | (mg) |
| hTfR.KI | Vehicle | — | 15, 4 | 4 | Plasma, brain, liver | NA |
| (homozygous) | Fusion 1 | 50 | 15, 4 | 5 | Plasma, brain, liver | 7.5 mg |
| | Fusion 3 | 50 | 15, 4 | 6 | Plasma, brain, liver | 7.5 mg |
| WT | Fusion 1 | 50 | 15, 4 | 5 | Plasma, brain, liver | 7.5 mg |
| | Fusion 3 | 50 | 15, 4 | 5 | Plasma, brain, liver | 7.5 mg |

[0508] Animal allocation to experimental groups: All animals used in this study were males but were distributed equally in each experimental group to account for differences across litters.

[0509] Formulation: Fc dimer:PGRN fusion proteins Fusion 1 and Fusion 3 were used at 5.87 mg/mL and 4.98 mg/mL, respectively.

[0510] Overall procedures: Experimental conditions were alternated when collecting tissues. Animal groups and sample collections were randomized.

[0511] In-life procedures: Submandibular bleeds were performed using 3 mm lancets (GoldenRod animal lancets). Plasma collection: Blood was collected in EDTA tubes (Sarstedt Microvette 500 K3E, Ref #201341102) and slowly inverted 10 times. For small volumes of blood (<100 μL), blood was collected in EDTA tubes with capillary tube (Sarstedt Microvette 100 K3E, Ref #201278100). EDTA tubes were immediately stored in the fridge until plasma preparation. The time between storage and preparation did not exceed 1 hour. The time of collection and time of processing were followed consistently. The tubes were centrifuged at 12,700 rpm for 7 minutes at 4° C. Plasma (top layer) was transferred to 0.6 mL Matrix tubes with rubber seal. Matrix tubes were snap frozen on dry ice before transferring to −80° C.

[0512] Terminal fluids/tissue collection procedures: Animals were deeply anesthetized via intraperitoneal (i.p.) injection of 2.5% Avertin and then tissues were collected in the order as described below:

[0513] Samples collected before intracardiac perfusion: Plasma collection: Blood was collected via cardiac puncture using a 1 mL Terumo tuberculin syringe attached to a 25 gauge needle (Ref #SS-01T2516) (Not pre-conditioned with EDTA). The needle was then detached and the blood was transferred to EDTA tubes (Sarstedt Microvette 500 K3E, Ref #201341102) and slowly inverted 10 times. Following this procedure, post collection methods were continued as described above in In-Life Procedures.

[0514] For samples collected after intracardiac perfusion, animals were transcardially perfused for 5 minutes with ice cold PBS using a peristaltic pump (Gilson Inc. Minipuls Evolution F110701) at a flow rate of 5 mL/minute. For tissues that can be dissected and pre-weighted during collection, the samples were placed directly into 1.5 mL Eppendorf tubes. Tissues were collected in the following order: Liver (post-perfusion): about 100 mg of liver was collected into 1.5 mL Eppendorf tubes. Eppendorf tubes were snap frozen on dry ice before transferring to −80° C. Brain: Right hemisphere was dissected into PK and other brain pieces. Both 50 mg PK and remaining brain pieces were collected into 1.5 mL Eppendorf tubes. Eppendorf tubes were snap frozen on dry ice before transferring to −80° C. Left hemisphere was placed in 4 mL of freshly made 4% paraformaldehyde at 4° C. for 72 hours and then transferred to 30% sucrose for 72 hours before being cut on the freezing microtome coronally at 30 μm/section.

### Protocol for Homogenization

[0515] Homogenization buffer was made by making a 1× of the Cell Signaling Technology 10× Cell lysis buffer (Cat No: 9803) (1× buffer: 20 mM Tris-HCl (pH 7.5), 150 mM NaCl, 1 mM Na₂EDTA, 1 mM EGTA, 1% Triton, 2.5 mM sodium pyrophosphate, 1 mM s-glycerophosphate, 1 mM Na₃VO₄, 1 μg/mL leupeptin) and supplementing with 1× protease inhibitor (Complete, Mini Protease Inhibitor cocktail tablets, Roche Cat. No. 04693124001) and 1× phosphatase inhibitor (PhosSTOP, Roche, Cat. No. 04906837001). Lysis buffer was added at about 10× volume of tissue weight for brain and liver samples in 1.5 mL tubes. A 3 mm tungsten carbide bead (Qiagen, Cat. No. 69997) was added to each tube and the tubes loaded into TissueLyser Cassetts. Samples were homogenized on the TissueLyser II (Qiagen Cat. No. 85300) at 29 Hz for 6 minutes (2×3 minute runs). Samples were then removed and run at max speed (18,000×g) on the tabletop centrifuge for 30 minutes at 4° C. The supernatant was transferred to a new 1.5 mL Eppendorf tube and protein concentration was measured using BCA.

Protocol for Fc Capture of hPGRN in ELISA

[0516] For the ELISA, 384-well clear microplates (Thermo Fisher Scientific 464718) were coated with a donkey polyclonal antibody specific for human Fc (Jackson ImmunoResearch #709-006-098). The capture antibody was diluted to a final concentration of 1 μg/mL in a sodium biocarbonate buffer. 25 μL/well of the capture coating solution was added to each assay plate, and the plates were incubated overnight at 4° C.

[0517] On the day of the assay, the assay plates were washed 3 times with PBST buffer using an automated plate washer (Biotek), after which 80 μL/well of a blocking solution (5% BSA in PBST buffer) was added. The assay plates were incubated in the blocking solution for at least 1 hour at room temperature. During the blocking, dilutions of the plasma, liver lysate, and brain lysate samples were prepared in assay diluent buffer (1% BSA in PBST) in 96-well polypropylene V-bottom plates (Greiner Bio-One 651201). For plasma, serial dilutions of 1:10, 1:100, 1:1000, 1:10,000, 1:100,000, and 1:1,000,000 were prepared. For liver, serial dilutions of 1:20, 1:100, 1:200, 1:400, and 1:800 were prepared. For brain, serial dilutions of 1:10 and 1:40 were prepared. In addition, standard curve samples ranging from 2 nM to 0 nM in concentration were prepared for both Fusion 1 and Fusion 3 using the same source material as was used for the dosing. For all samples and standards, a minimum volume of 100 μL was prepared in the 96-well plates.

[0518] After blocking, assay plates were washed 3 times with PBST using the plate washer, and then a liquid transfer robot (Hamilton) was used to transfer 25 μL of each standard or sample (in duplicate) to the assay plates. Following sample transfer, assay plates were covered and incubated for 2 hours at room temperature.

[0519] A detection antibody solution was prepared by dilution of a biotinylated goat polyclonal human progranulin detection antibody (R&D #BAF2420; FIGS. 8A, 8B, 9A, and 9B) or another detection antibody targeting a site in Fc (FIGS. 10A, 10B, 11A, and 11B) to a final concentration of 0.5 μg/mL in the assay diluent buffer. After sample incubation, plates were washed 6 times with PBST using the plate washer (rotating the plates 180 degrees after the first 3 washes), and 25 μl/well of the detection solution was added to the plates. Assay plates were incubated for 1 hour at room temperature with the detection antibody, after which they were washed 3 times with PBST on the plate washer. A working solution of streptavidin-HRP (Jackson Immunoresearch #016-030-084) was prepared by diluting the streptavidin-HRP stock 1:50,000 in assay diluent buffer. 25 μL/well of this solution was added to each well and plates were incubated 1 hour at room temperature.

[0520] After streptavidin-HRP incubation, plates were washed 3 times with PBST on the plate washer, and 25 μL/well of 1-Step Ultra-TMB substrate solution (Thermo Fisher #34029) was added to the assay plates. Assay plates were incubated at room temperature for approximately 10 minutes to allow color to develop, after which 25 μL/well of BioFX 450 nm Liquid Stop Solution (Surmodics #LSTP-1000-01) was added. After stop solution addition, plates were read using the absorbance mode of a plate reader (BioTek).

[0521] Raw absorbance data from the ELISA was analyzed by first subtracting the background absorbance signal (from wells containing no sample or standard in the assay diluent) from all assay wells. The means of the standard curve samples were fit to a four parameter logistic model equation using GraphPad Prism software, and the fit was used to calculate the concentration of Fusion 1 and Fusion 3 in each plasma or tissue lysate sample (after correcting for the sample dilution). For the brain and liver lysates, the concentrations were multiplied by 10 to adjust for the dilution of tissue during lysate preparation to obtain the concentration value in the original tissue sample.

### Results

[0522] The brain and liver levels of Fc dimer:PGRN fusion proteins in hTfR and WT mice are shown in FIGS. 8A and 8B (generated using the biotinylated goat polyclonal human progranulin detection antibody (R&D #BAF2420)). hTfR mice showed significant increase in Fc dimer:PGRN fusion proteins uptake compared to that of WT mice. FIGS. 9A and 9B show the brain:plasma ratios and brain:liver ratios, respectively, of Fc dimer:PGRN fusion proteins Fusion 1 and Fusion 3 normalized to Fusion 3 in WT. Further, FIGS. 10A, 10B, 11A, and 11B (generated using a different detection antibody that targets a site in Fc) also show that the hTfR mice had more Fc dimer:PGRN fusion proteins uptake in the brain compared to that of WT mice.

### Example 10. Pharmacokinetic Properties of Fusion Proteins in Plasma

[0523] WT mice were dosed once at 10 mg/kg of Fc dimer:PGRN fusion protein Fusion 1 or Fusion 3, and plasma samples were obtained at the timepoints indicated. The concentration of each Fc dimer:PGRN fusion protein was measured by ELISA in plasma samples using an Fc-capture-Fc-detection architecture. The detection antibody used detects a site in Fc of the fusion proteins. FIGS. 12A and 12B indicate mean plasma concentrations of Fusion 1 and Fusion 3. FIGS. 12C and 12D indicate the plasma concentrations of Fusion 1 and Fusion 3 at 0.25 hr and 4 hr post dosing.

### Example 11. Modified Fc Polypeptides that Bind to TfR

[0524] This example describes modifications to Fc polypeptides to confer transferrin receptor (TfR) binding and transport across the blood-brain barrier (BBB).

[0525] Unless otherwise indicated, the positions of amino acid residues in this section are numbered based on EU index numbering for a human IgG1 wild-type Fc region.

### Generation and Characterization of Fc Polypeptides Comprising Modifications at Positions 384, 386, 387, 388, 389, 390, 413, 416, and 421 (CH3C Clones)

[0526] Yeast libraries containing Fc regions having modifications introduced into positions including amino acid positions 384, 386, 387, 388, 389, 390, 413, 416, and 421 were generated as described below. Illustrative clones that bind to TfR are shown in Tables 6 and 7 at the end of the Examples section.

[0527] After an additional two rounds of sorting, single clones were sequenced and four unique sequences were identified. These sequences had a conserved Trp at position 388, and all had an aromatic residue (i.e., Trp, Tyr, or His) at position 421. There was a great deal of diversity at other positions.

[0528] The four clones selected from the library were expressed as Fc fusions to Fab fragments in CHO or 293 cells, and purified by Protein A and size-exclusion chromatography, and then screened for binding to human TfR in the presence or absence of holo-Tf by ELISA. The clones all bound to human TfR and the binding was not affected by the addition of excess (5 μM) holo-Tf. Clones were also tested for binding to 293F cells, which endogenously express human TfR. The clones bound to 293F cells, although the overall binding was substantially weaker than the high-affinity positive control.

[0529] Next, it was tested whether clones could internalize in TfR-expressing cells using clone CH3C.3 as a test clone. Adherent HEK 293 cells were grown in 96-well plates to about 80% confluence, media was removed, and samples were added at 1 μM concentrations: clone CH3C.3, anti-TfR benchmark positive control antibody (Ab204), anti-BACE1 benchmark negative control antibody (Ab107), and human IgG isotype control (obtained from Jackson Immunoresearch). The cells were incubated at 37° C. and 8% C02 concentration for 30 minutes, then washed, permeabilized with 0.1% Triton™ X-100, and stained with anti-human-IgG-Alexa Fluor® 488 secondary antibody. After additional washing, the cells were imaged under a high content fluorescence microscope (i.e., an Opera Phenix™ system), and the number of puncta per cell was quantified. At 1 μM, clone CH3C.3 showed a similar propensity for internalization to the positive anti-TfR control, while the negative controls showed no internalization.

### Further Engineering of Clones

[0530] Additional libraries were generated to improve the affinity of the initial hits against human TfR using a soft randomization approach, wherein DNA oligos were generated to introduce soft mutagenesis based on each of the original four hits. Additional clones were identified that bound TfR and were selected. The selected clones fell into two general sequence groups. Group 1 clones (i.e., clones CH3C.18, CH3C.21, CH3C.25, and CH3C.34) had a semi-conserved Leu at position 384, a Leu or His at position 386, a conserved and a semi-conserved Val at positions 387 and 389, respectively, and a semi-conserved P-T-W motif at positions 413, 416, and 421, respectively. Group 2 clones had a conserved Tyr at position 384, the motif TXWSX at positions 386-390, and the conserved motif S/T-E-F at positions 413, 416, and 421, respectively. Clones CH3C.18 and CH3C.35 were used in additional studies as representative members of each sequence group.

### Epitope Mapping

[0531] To determine whether the engineered Fc regions bound to the apical domain of TfR, TfR apical domain was expressed on the surface of phage. To properly fold and display the apical domain, one of the loops had to be truncated and the sequence needed to be circularly permuted. Clones CH3C.18 and CH3C.35 were coated on ELISA plates and a phage ELISA protocol was followed. Briefly, after washing and blocking with 1% PBSA, dilutions of phage displaying were added and incubated at room temperature for 1 hour. The plates were subsequently washed and anti-M13-HRP was added, and after additional washing the plates were developed with TMB substrate and quenched with 2N H₂SO₄. Both clones CH3C.18 and CH3C.35 bound to the apical domain in this assay.

### Paratope Mapping

[0532] To understand which residues in the Fc domain were most important for TfR binding, a series of mutant clone CH3C.18 and clone CH3C.35 Fc regions was created in which each mutant had a single position in the TfR binding register mutated back to wild-type. The resulting variants were expressed recombinantly as Fc-Fab fusions and tested for binding to human or cyno TfR. For clone CH3C.35, positions 388 and 421 were important for binding; reversion of either of these to wild-type completely ablated binding to human TfR.

### Binding Characterization of Maturation Clones

[0533] Binding ELISAs were conducted with purified Fc-Fab fusion variants with human or cyno TfR coated on the plate, as described above. The variants from the clone CH3C.18 maturation library, clone CH3C.3.2-1, clone CH3C.3.2-5, and clone CH3C.3.2-19, bound human and cyno TfR with approximately equivalent EC₅₀ values, whereas the parent clones CH3C.18 and CH3C.35 had greater than 10-fold better binding to human versus cyno TfR.

[0534] Next, it was tested whether the modified Fc polypeptides internalized in human and monkey cells. Using the protocol described above, internalization in human HEK 293 cells and rhesus LLC-MK2 cells was tested. The variants that similarly bound human and cyno TfR, clones CH3C.3.2-5 and CH3C.3.2-19, had significantly improved internalization in LLC-MK2 cells as compared with clone CH3C.35.

### Additional Engineering of Clones

[0535] Additional engineering to further affinity mature clones CH3C.18 and CH3C.35 involved adding additional mutations to the positions that enhanced binding through direct interactions, second-shell interactions, or structure stabilization. This was achieved via generation and selection from an “NNK walk” or “NNK patch” library. The NNK walk library involved making one-by-one NNK mutations of residues that are near to the paratope. By looking at the structure of Fc bound to FcγRI (PDB ID: 4W40), 44 residues near the original modification positions were identified as candidates for interrogation. Specifically, the following residues were targeted for NNK mutagenesis: K248, R255, Q342, R344, E345, Q347, T359, K360, N361, Q362, S364, K370, E380, E382, S383, G385, Y391, K392, T393, D399, S400, D401, S403, K409, L410, T411, V412, K414, S415, Q418, Q419, G420, V422, F423, S424, S426, Q438, S440, S442, L443, S444, P4458, G446, and K447. The 44 single point NNK libraries were generated using Kunkel mutagenesis, and the products were pooled and introduced to yeast via electroporation, as described above for other yeast libraries.

[0536] The combination of these mini-libraries (each of which had one position mutated, resulting in 20 variants) generated a small library that was selected using yeast surface display for any positions that lead to higher affinity binding. Selections were performed as described above, using TfR apical domain proteins. After three rounds of sorting, clones from the enriched yeast library were sequenced, and several “hot-spot” positions were identified where certain point mutations significantly improved the binding to apical domain proteins. For clone CH3C.35, these mutations included E380 (mutated to Trp, Tyr, Leu, or Gln) and S415 (mutated to Glu). The sequences of the clone CH3C.35 single and combination mutants are set forth in SEQ ID NOS:27-38. For clone CH3C.18, these mutations included E380 (mutated to Trp, Tyr, or Leu) and K392 (mutated to Gln, Phe, or His). The sequences of the clone CH3C.18 single mutants are set forth in SEQ ID NOS:21-26.

### Additional Maturation Libraries to Improve Clone CH3C.35 Affinity

[0537] An additional library to identify combinations of mutations from the NNK walk library, while adding several additional positions on the periphery of these, was generated as described for previous yeast libraries. In this library, the YxTEWSS (SEQ ID NO:302) and TxxExxxxF motifs were kept constant, and six positions were completely randomized: E380, K392, K414, S415, S424, and S426. Positions E380 and S415 were included because they were “hot spots” in the NNK walk library. Positions K392, S424, and S426 were included because they make up part of the core that may position the binding region, while K414 was selected due to its adjacency to position 415.

[0538] This library was sorted, as previously described, with the cyno TfR apical domain only. The enriched pool was sequenced after five rounds, and the sequences of the modified regions of the identified unique clones are set forth in SEQ ID NOS:42-59.

[0539] The next libraries were designed to further explore acceptable diversity in the main binding paratope. Each of the original positions (384, 386, 387, 388, 389, 390, 413, 416, and 421) plus the two hot spots (380 and 415) were individually randomized with NNK codons to generate a series of single-position saturation mutagenesis libraries on yeast. In addition, each position was individually reverted to the wild-type residue, and these individual clones were displayed on yeast. It was noted that positions 380, 389, 390, and 415 were the only positions that retained substantial binding to TfR upon reversion to the wild-type residue (some residual but greatly diminished binding was observed for reversion of 413 to wild-type).

[0540] The single-position NNK libraries were sorted for three rounds against the human TfR apical domain to collect the top ˜5% of binders, and then at least 16 clones were sequenced from each library. The results indicate what amino acids at each position can be tolerated without significantly reducing binding to human TfR, in the context of clone CH3C.35. A summary is below:

### Position 380: Trp, Leu, or Glu;

### Position 384: Tyr or Phe;

[0541] Position 386: Thr only;
Position 387: Glu only;
Position 388: Trp only;
Position 389: Ser, Ala, or Val (although the wild type Asn residue seems to retain some binding, it did not appear following library sorting);

### Position 390: Ser or Asn;

### Position 413: Thr or Ser;

### Position 415: Glu or Ser;

[0542] Position 416: Glu only; and
Position 421: Phe only.

[0543] The above residues, when substituted into clone CH3C.35 as single changes or in combinations, represent paratope diversity that retains binding to TfR apical domain. Clones having mutations at these positions include those shown in Table 7, and the sequences of the CH3 domains of these clones are set forth in SEQ ID NOS:34-38, 58, and 60-90.

### Example 12. Additional Fc Positions that can be Modified to Confer TfR Binding

[0544] Additional modified Fc polypeptides that bind to transferrin receptor (TfR) were generated having modifications at alternative sites in the Fc region, e.g., at the following positions:

[0545] positions 274, 276, 283, 285, 286, 287, 288, and 290 (CH2A2 clones);

[0546] positions 266, 267, 268, 269, 270, 271, 295, 297, 298, and 299 (CH2C clones);

[0547] positions 268, 269, 270, 271, 272, 292, 293, 294, and 300 (CH2D clones);

[0548] positions 272, 274, 276, 322, 324, 326, 329, 330, and 331 (CH2E3 clones); or

[0549] positions 345, 346, 347, 349, 437, 438, 439, and 440 (CH3B clones).

[0550] Illustrative CH3B clones that bind to TfR are set forth in SEQ ID NOS:111-115. Illustrative CH2A2 clones that bind to TfR are set forth in SEQ ID NOS: 116-120. Illustrative CH2C clones that bind to TfR are set forth in SEQ ID NOS:121-125. Illustrative CH2D clones that bind to TfR are set forth in SEQ ID NOS:126-130. Illustrative CH2E3 clones that bind to TfR are set forth in SEQ ID NOS:131-135.

### Example 13. Methods

### Generation of Phage-Display Libraries

[0551] A DNA template coding for the wild-type human Fc sequence was synthesized and incorporated into a phagemid vector. The phagemid vector contained an ompA or pelB leader sequence, the Fc insert fused to c-Myc and 6×His (SEQ ID NO:303) epitope tags, and an amber stop codon followed by M13 coat protein pIII.

[0552] Primers containing “NNK” tricodons at the desired positions for modifications were generated, where N is any DNA base (i.e., A, C, G, or T) and K is either G or T. Alternatively, primers for “soft” randomization were used, where a mix of bases corresponding to 70% wild-type base and 10% of each of the other three bases was used for each randomization position. Libraries were generated by performing PCR amplification of fragments of the Fc region corresponding to regions of randomization and then assembled using end primers containing SfI restriction sites, then digested with SfI and ligated into the phagemid vectors. Alternatively, the primers were used to conduct Kunkel mutagenesis. The ligated products or Kunkel products were transformed into electrocompetent E. coli cells of strain TG1 (obtained from Lucigen®). The E. coli cells were infected with M13K07 helper phage after recovery and grown overnight, after which library phage were precipitated with 5% PEG/NaCl, resuspended in 15% glycerol in PBS, and frozen until use. Typical library sizes ranged from about 10⁹ to about 10¹¹ transformants. Fc-dimers were displayed on phage via pairing between pIII-fused Fc and soluble Fc not attached to pIII (the latter being generated due to the amber stop codon before pIII).

### Generation of Yeast-Display Libraries

[0553] A DNA template coding for the wild-type human Fc sequence was synthesized and incorporated into a yeast display vector. For CH2 and CH3 libraries, the Fc polypeptides were displayed on the Aga2p cell wall protein. Both vectors contained prepro leader peptides with a Kex2 cleavage sequence, and a c-Myc epitope tag fused to the terminus of the Fc.

[0554] Yeast display libraries were assembled using methods similar to those described for the phage libraries, except that amplification of fragments was performed with primers containing homologous ends for the vector. Freshly prepared electrocompetent yeast (i.e., strain EBY100) were electroporated with linearized vector and assembled library inserts. Electroporation methods will be known to one of skill in the art. After recovery in selective SD-CAA media, the yeast were grown to confluence and split twice, then induced for protein expression by transferring to SG-CAA media. Typical library sizes ranged from about 10⁷ to about 10¹¹ transformants. Fc-dimers were formed by pairing of adjacently displayed Fc monomers.

### General Methods for Phaize Selection

[0555] Phage methods were adapted from Phage Display: A Laboratory Manual (Barbas, 2001). Additional protocol details can be obtained from this reference.

### Plate Sorting Methods

[0556] Antigen was coated on MaxiSorp® microtiter plates (typically 1-10 μg/mL) overnight at 4° C. The phage libraries were added into each well and incubated overnight for binding. Microtiter wells were washed extensively with PBS containing 0.05% Tween® 20 (PBST) and bound phage were eluted by incubating the wells with acid (typically 50 mM HCl with 500 mM KCl, or 100 mM glycine, pH 2.7) for 30 minutes. Eluted phage were neutralized with 1 M Tris (pH 8) and amplified using TG1 cells and M13/KO7 helper phage and grown overnight at 37° C. in 2YT media containing 50 μg/mL carbenacillin and 50 ug/mL Kanamycin. The titers of phage eluted from a target-containing well were compared to titers of phage recovered from a non-target-containing well to assess enrichment. Selection stringency was increased by subsequently decreasing the incubation time during binding and increasing washing time and number of washes.

### Bead Sorting Methods

[0557] Antigen was biotinylated through free amines using NHS-PEG4-Biotin (obtained from Pierce™). For biotinylation reactions, a 3- to 5-fold molar excess of biotin reagent was used in PBS. Reactions were quenched with Tris followed by extensive dialysis in PBS. The biotinylated antigen was immobilized on streptavidin-coated magnetic beads, (i.e., M280-streptavidin beads obtained Thermo Fisher). The phage display libraries were incubated with the antigen-coated beads at room temperature for 1 hour. The unbound phage were then removed and beads were washed with PBST. The bound phage were eluted by incubating with 50 mM HCl containing 500 mM KCl (or 0.1 M glycine, pH 2.7) for 30 minutes, and then neutralized and propagated as described above for plate sorting.

[0558] After three to five rounds of panning, single clones were screened by either expressing Fc on phage or solubly in the E. coli periplasm. Such expression methods will be known to one of skill in the art. Individual phage supernatants or periplasmic extracts were exposed to blocked ELISA plates coated with antigen or a negative control and were subsequently detected using HRP-conjugated goat anti-Fc (obtained from Jackson Immunoresearch) for periplasmic extracts or anti-M13 (GE Healthcare) for phage, and then developed with TMB reagent (obtained from Thermo Fisher). Wells with OD₄₅₀ values greater than around 5-fold over background were considered positive clones and sequenced, after which some clones were expressed either as a soluble Fc fragment or fused to Fab fragments

### General Methods for Yeast Selection

### Bead Sorting (Magnetic-Assisted Cell Sorting (MAC's)) Methods

[0559] MACS and FACS selections were performed similarly to as described in Ackerman, et al. 2009 Biotechnol. Prog. 25(3), 774. Streptavidin magnetic beads (e.g., M-280 streptavidin beads from ThermoFisher) were labeled with biotinylated antigen and incubated with yeast (typically 5-10× library diversity). Unbound yeast were removed, the beads were washed, and bound yeast were grown in selective media and induced for subsequent rounds of selection.

### Fluorescence-Activated Cell Sorting (FACS) Methods

[0560] Yeast were labeled with anti-c-Myc antibody to monitor expression and biotinylated antigen (concentration varied depending on the sorting round). In some experiments, the antigen was pre-mixed with streptavidin-Alexa Fluor® 647 in order to enhance the avidity of the interaction. In other experiments, the biotinylated antigen was detected after binding and washing with streptavidin-Alexa Fluor® 647. Singlet yeast with binding were sorted using a FACS Aria III cell sorter. The sorted yeast were grown in selective media then induced for subsequent selection rounds.

[0561] After an enriched yeast population was achieved, yeast were plated on SD-CAA agar plates and single colonies were grown and induced for expression, then labeled as described above to determine their propensity to bind to the target. Positive single clones were subsequently sequenced for binding antigen, after which some clones were expressed either as a soluble Fc fragment or as fused to Fab fragments.

### General Methods for Screening

### Screening by ELISA

[0562] Clones were selected from panning outputs and grown in individual wells of 96-well deep-well plates. The clones were either induced for periplasmic expression using autoinduction media (obtained from EMD Millipore) or infected with helper phage for phage-display of the individual Fc variants on phage. ELISA plates were coated with antigen, typically at 0.5 mg/mL overnight, then blocked with 1% BSA before addition of phage or periplasmic extracts. After a 1-hour incubation and washing off unbound protein, HRP-conjugated secondary antibody was added (i.e., anti-Fc or anti-M13 for soluble Fc or phage-displayed Fc, respectively) and incubated for 30 minutes. The plates were washed again, and then developed with TMB reagent and quenched with 2N sulfuric acid. Absorbance at 450 nm was quantified using a plate reader (BioTek*) and binding curves were polotted using Prism software where applicable. In some assays, soluble transferrin or other competitor was added during the binding step, typically at significant molar excess.

### Screening by Flow Cytometry

[0563] Fc variant polypeptides (expressed either on phage, in periplasmic extracts, or solubly as fusions to Fab fragments) were added to cells in 96-well V-bottom plates (about 100,000 cells per well in PBS+1% BSA (PBSA)), and incubated at 4° C. for 1 hour. The plates were subsequently spun and the media was removed, and then the cells were washed once with PBSA. The cells were resuspended in PBSA containing secondary antibody (typically goat anti-human-IgG-Alexa Fluor® 647 (obtained from Thermo Fisher)). After 30 minutes, the plates were spun and the media was removed, the cells were washed 1-2 times with PBSA, and then the plates were read on a flow cytometer (i.e., a FACSCanto™ II flow cytometer). Median fluorescence values were calculated for each condition using FlowJo software and binding curves were plotted with Prism software.

### Example 14. Lipidomics and Mass Spectrometry Methods

### Mass Spectrometry Sample Preparation

[0564] Cells (e.g., bone marrow-derived macrophages (BMDMs)) were washed thoroughly with PBS, and BMP species were extracted with methanol spiked with BMP(14:0_14:0) as an internal standard. Following extraction of BMP species with methanol, samples were vortex mixed and centrifuged at 14,000 rpm and 4° C. for 20 minutes. Supernatants were then transferred to liquid chromatography-mass spectrometry vials for further analysis.

[0565] Tissue samples were weighed (e.g., 20 mg) and then homogenized in methanol (200 μL) spiked with BMP(14:0_14:0) using a TissueLyser homogenizer (Qiagen, Valencia, Calif., USA). Homogenates were spun at 14,000 rpm for 20 minutes at 4° C. Supernatants were then transferred to liquid chromatography-mass spectrometry vials for further analysis.

[0566] Biofluids (10 μL) were protein-precipitated with methanol (100 μL) containing BMP(14:0_14:0) and spun at 14,000 rpm for 20 min, 4° C. Supernatants were then transferred to liquid chromatography-mass spectrometry vials for further analysis.

### Lipidomics Procedures

[0567] Overall procedures: Animal groups and sample collection were randomized during lipid extraction.

[0568] Extraction of lipids and metabolites from urine: Urine was collected into Thermo Matrix Tubes and stored at −80° C. Urine was thawed on ice and centrifuged at 1,000×g for 10 minutes at 4° C. to remove particulates. 10 μL of urine was transferred into 2.0 mL Safe-Lock Eppendorf tube (Eppendorf Cat #022600044) and 200 μL of ice-cold MS-grade methanol containing internal standard mix (2 μL per sample). Samples were vortexed for 5 minutes at 2,500 rpm. Samples were centrifuged for 20 minutes at 21,000×g at 4° C. Methanol supernatant was transferred to LCMS glass vials in 96 well plate. Samples were stored at −80° C. until run on LCMS.

[0569] Extraction of lipids and metabolites from plasma: Plasma samples were thawed on ice. Plasma/serum (10 μL) or urine (20 μL) were transferred into a 2 mL Safe-Lock Eppendorf tube (Eppendorf Cat #022600044). Ice cold MS-grade methanol (200 μL) containing internal standard mix (2 μL per sample) was vortexed for 5 min and then centrifuged for 20 min at 21,000×g at 4° C. Methanol supernatant was transferred into LCMS glass vials in 96 well-plates for lipidomics and metabolomics analysis. Samples were stored at −80° C. until run on LCMS.

[0570] Extraction of lipids and metabolites from brain: Frontal cortex of mouse brain (18-20 mg) was transferred into 2 mL Safe-Lock Eppendorf tube (Eppendorf Cat #022600044) that was kept in dry ice containing a 5 mm stainless steel bead (QIAGEN Cat #69989). MS-grade methanol (400 μL) containing internal standard mix (2 μL per sample) was added. Tissues were homogenized with Tissuelyser for 30 sec at 25 Hz in the cold room and then centrifuged for 20 min at 21,000×g at 4° C. (bead left in the tube). Methanol supernatant was transferred into new 1.5 mL Eppendorf vials and left at −20° C. for 1 hour to allow further precipitation of proteins. Vials were centrifuged for 20 min at 21,000×g at 4° C. and the methanol supernatant was transferred in LCMS glass vials for lipidomics and metabolomics analysis. Samples stored at −80° C. until run on LCMS.

[0571] Extraction of lipids and metabolites from CSF: CSF was collected from mouse with the pipet method. CSF (5 μL) was added to ice-cold MS-grad MeOH (100 μL) containing internal standard mix (0.2 μL per sample) directly in glass vials. Glass vials with CSF and MeOH were vortexed for 5 minutes and directly run on LCMS.

[0572] Extraction of lipids and metabolites from liver: liver (20 mg) was transferred into a 2 mL Safe-Lock Eppendorf tube (Eppendorf Cat #022600044) kept in dry ice containing a 5 mm stainless steel bead (QIAGEN Cat #69989). MS-grade methanol (400 μL) containing internal standard mix (2 μL per sample) was then added. Tissues were homogenized with Tissuelyser for 30 sec at 25 Hz (in the cold room) and centrifuged for 20 min at 21,000×g at 4° C. (bead left in the tube). The methanol supernatant was transferred to new 1.5 mL Eppendorf vials and left at −20° C. for three hours to allow further precipitation of proteins. Vials were centrifuged for 20 min at 21,000×g at 4° C., and the methanol supernatant was transferred to LCMS glass vials for lipidomics and metabolomics analysis. Samples stored −80° C. until run on LCMS.

### Liquid Chromatography-Mass Spectrometry

[0573] BMP analyses were performed by liquid chromatography (Shimadzu Nexera X2 system, Shimadzu Scientific Instrument, Columbia, Md., USA) coupled to electrospray mass spectrometry (Sciex 6500+ QTRAP, Sciex, Framingham, Mass., USA). For each analysis, 5 μL of sample was injected onto a BEH amide 1.7 μm, 2.1×150 mm column (Waters Corporation, Milford, Mass., USA) using a flow rate of 0.40 mL/min. at 55° C. Mobile phase A consisted of water with 10 mM ammonium formate+0.1% formic acid. Mobile phase B consisted of acetonitrile with 0.1% formic acid. The gradient was programmed as follows: 0.0-1.0 min. at 95% B; 1.0-7.0 min. to 50% B; 7.0-7.1 min. to 95% B; and 7.1-12.0 min. at 95% B. Electrospray ionization was performed in the negative-ion mode using the following settings: curtain gas at 25; collision gas was set at medium; ion spray voltage at −4500; temperature at 600; ion source gas 1 at 50; ion source gas 2 at 60; collision energy at −50, CXP at −15; DP at −60; EP at −10; dwell time at 20 ms. Data acquisition was performed using Analyst 1.6.3 (Sciex) in multiple reaction monitoring mode (MRM). BMP species were detected using the MRM transition parameters reported in Table 3. BMP species were quantified using BMP(14:0_14:0) as the internal standard. BMP species were identified based on their retention times and MRM properties. Quantification was performed using MultiQuant 3.02 (Sciex) after correction for isotopic overlap. BMP species were normalized to either total protein amount, tissue weight or biofluid volume. Protein concentration was measured using the bicinchoninic acid (BCA) assay (Pierce, Rockford, Ill., USA).

[0574] Precursor (Q1) [M−H]⁻ and product ion (Q3) m/z transitions were used to measure BMP species. The BMP species were identified from the Q1 and Q3 values according to Table 3. Abbreviations are used herein to refer to species with two side-chains, where the structures of the fatty acid side chains are indicated within parentheses in the BMP format (e.g., BMP(18:1_18:1)). The numerals follow the standard fatty acid notation format of number of fatty acid carbon atoms: number of double bonds. The “e-” prefix is used to indicate the presence of an alkyl ether substituent (e.g., BMP (16:0e_18:0)) where the carbonyl oxygen of the fatty acid side chain is replaced with two hydrogen atoms. Alternatively the BMP species can be referred to generically according to the total number of carbon atoms: total number of double bonds; species having similar values can be distinguished by their Q1 and Q3 values.

TABLE 3
BMP Species and MRM Transition Parameters

| | Total carbon | | |
|---|---|---|---|
| | atoms:total | | |
| Name | unsaturations | Q1 | Q3 |
| BMP(14:0_14:0) | BMP(28:0) | 665.5 | 227.2 |
| BMP(14:0_16:0) | BMP(30:0) | 693.6 | 255.2 |
| BMP(14:0_16:1) | BMP(30:1) | 691.6 | 253.2 |
| BMP(14:0_18:0) | BMP(32:0) | 721.6 | 283.2 |
| BMP(14:0_18:1) | BMP(32:1) | 719.6 | 281.2 |
| BMP(14:0_18:2) | BMP(32:2) | 717.6 | 279.2 |
| BMP(14:0_18:3) | BMP(32:3) | 715.6 | 277.2 |
| BMP(14:0_20:1) | BMP(34:1) | 747.6 | 309.2 |
| BMP(14:0_20:2) | BMP(34:2) | 745.6 | 307.2 |
| BMP(14:0_20:3) | BMP(34:3) | 743.6 | 305.2 |
| BMP(14:0_20:4) | BMP(34:4) | 741.6 | 303.2 |
| BMP(14:0_20:5) | BMP(34:5) | 739.6 | 301.2 |
| BMP(14:0_22:4) | BMP(36:4) | 769.6 | 331.2 |
| BMP(14:0_22:5) | BMP(36:5) | 767.6 | 329.2 |
| BMP(14:0_22:6) | BMP(36:6) | 765.6 | 327.2 |
| BMP(16:0_16:0) | BMP(32:0) | 721.6 | 255.2 |
| BMP(16:0_16:1) | BMP(32:1) | 719.6 | 253.2 |
| BMP(16:0_18:0) | BMP(34:0) | 749.6 | 283.2 |
| BMP(16:0_18:1) | BMP(34:1) | 747.6 | 281.2 |
| BMP(16:0_18:2) | BMP(34:2) | 745.6 | 279.2 |
| BMP(16:0_18:3) | BMP(34:3) | 743.6 | 277.2 |
| BMP(16:0_20:1) | BMP(36:1) | 775.6 | 309.2 |
| BMP(16:0_20:2) | BMP(36:2) | 773.6 | 307.2 |
| BMP(16:0_20:3) | BMP(36:3) | 771.6 | 305.2 |
| BMP(16:0_20:4) | BMP(36:4) | 769.6 | 303.2 |
| BMP(16:0_20:5) | BMP(36:5) | 767.6 | 301.2 |
| BMP(16:0_22:4) | BMP(38:4) | 797.6 | 331.2 |
| BMP(16:0_22:5) | BMP(38:5) | 795.6 | 329.2 |
| BMP(16:0_22:6) | BMP(38:6) | 793.6 | 327.2 |
| BMP(16:1_16:1) | BMP(32:2) | 717.6 | 253.2 |
| BMP(16:1_18:0) | BMP(34:1) | 747.6 | 283.2 |
| BMP(16:1_18:1) | BMP(34:2) | 745.6 | 281.2 |
| BMP(16:1_18:2) | BMP(34:3) | 743.6 | 279.2 |
| BMP(16:1_18:3) | BMP(34:4) | 741.6 | 277.2 |
| BMP(16:1_20:1) | BMP(36:2) | 773.6 | 309.2 |
| BMP(16:1_20:2) | BMP(36:3) | 771.6 | 307.2 |
| BMP(16:1_20:3) | BMP(36:4) | 769.6 | 305.2 |
| BMP(16:1_20:4) | BMP(36:5) | 767.6 | 303.2 |
| BMP(16:1_20:5) | BMP(36:6) | 765.6 | 301.2 |
| BMP(16:1_22:4) | BMP(38:5) | 795.6 | 331.2 |
| BMP(16:1_22:5) | BMP(38:6) | 793.6 | 329.2 |
| BMP(16:1_22:6) | BMP(38:7) | 791.6 | 327.2 |
| BMP(16:0e_14:0) | BMP(40:0) | 679.5 | 227.2 |
| BMP(16:0e_16:0) | BMP(32:0) | 707.6 | 255.2 |
| BMP(16:0e_18:0) | BMP(34:0) | 735.6 | 283.2 |
| BMP(16:0e_18:1) | BMP(34:1) | 733.6 | 281.2 |
| BMP(16:0e_18:2) | BMP(34:2) | 731.6 | 279.2 |
| BMP(16:0e_18:3) | BMP(34:3) | 729.6 | 277.2 |
| BMP(16:0e_20:3) | BMP(36:3) | 757.6 | 305.2 |
| BMP(16:0e_20:4) | BMP(36:4) | 755.6 | 303.2 |
| BMP(16:0e_20:5) | BMP(36:5) | 753.6 | 301.2 |
| BMP(16:0e_22:4) | BMP(38:4) | 783.6 | 331.2 |
| BMP(16:0e_22:6) | BMP(38:6) | 779.6 | 327.2 |
| BMP(16:1e_14:0) | BMP(30:1) | 677.5 | 227.2 |
| BMP(16:1e_16:0) | BMP(32:1) | 705.6 | 255.2 |
| BMP(16:1e_18:0) | BMP(34:1) | 733.6 | 283.2 |
| BMP(16:1e_18:1) | BMP(34:2) | 731.6 | 281.2 |
| BMP(16:1e_18:2) | BMP(34:3) | 729.6 | 279.2 |
| BMP(16:1e_18:3) | BMP(34:4) | 727.6 | 277.2 |
| BMP(16:1e_20:3) | BMP(36:4) | 755.6 | 305.2 |
| BMP(16:1e_20:4) | BMP(36:5) | 753.6 | 303.2 |
| BMP(16:1e_20:5) | BMP(36:6) | 751.6 | 301.2 |
| BMP(16:1e_22:4) | BMP(38:5) | 781.6 | 331.2 |
| BMP(16:1e_22:6) | BMP(38:7) | 777.6 | 327.2 |
| BMP(18:0_18:0) | BMP(36:0) | 777.6 | 283.2 |
| BMP(18:0_18:1) | BMP(36:1) | 775.6 | 281.2 |
| BMP(18:0_18:2) | BMP(36:2) | 773.6 | 279.2 |
| BMP(18:0_18:3) | BMP(36:3) | 771.6 | 277.2 |
| BMP(18:0_20:1) | BMP(38:1) | 803.6 | 309.2 |
| BMP(18:0_20:2) | BMP(38:2) | 801.6 | 307.2 |
| BMP(18:0_20:3) | BMP(38:3) | 799.6 | 305.2 |
| BMP(18:0_20:4) | BMP(38:4) | 797.6 | 303.2 |
| BMP(18:0_20:5) | BMP(38:5) | 795.6 | 301.2 |
| BMP(18:0_22:4) | BMP(40:4) | 825.6 | 331.2 |
| BMP(18:0_22:5) | BMP(40:5) | 823.6 | 329.2 |
| BMP(18:0_22:6) | BMP(40:6) | 821.6 | 327.2 |
| BMP(18:1_18:1) | BMP(36:2) | 773.6 | 281.2 |
| BMP(18:1_18:2) | BMP(36:3) | 771.6 | 279.2 |
| BMP(18:1_18:3) | BMP(36:4) | 769.6 | 277.2 |
| BMP(18:1_20:1) | BMP(38:2) | 801.6 | 309.2 |
| BMP(18:1_20:2) | BMP(38:3) | 799.6 | 307.2 |
| BMP(18:1_20:3) | BMP(38:4) | 797.6 | 305.2 |
| BMP(18:1_20:4) | BMP(38:5) | 795.6 | 303.2 |
| BMP(18:1_20:5) | BMP(38:6) | 793.6 | 301.2 |
| BMP(18:1_22:4) | BMP(40:5) | 823.6 | 331.2 |
| BMP(18:1_22:5) | BMP(40:6) | 821.6 | 329.2 |
| BMP(18:1_22:6) | BMP(40:7) | 819.6 | 327.2 |
| BMP(18:2_18:2) | BMP(36:4) | 769.6 | 279.2 |
| BMP(18:2_18:3) | BMP(36:5) | 767.6 | 277.2 |
| BMP(18:2_20:1) | BMP(38:3) | 799.6 | 309.2 |
| BMP(18:2_20:2) | BMP(38:4) | 797.6 | 307.2 |
| BMP(18:2_20:3) | BMP(38:5) | 795.6 | 305.2 |
| BMP(18:2_20:4) | BMP(38:6) | 793.6 | 303.2 |
| BMP(18:2_20:5) | BMP(38:7) | 791.6 | 301.2 |
| BMP(18:2_22:4) | BMP(40:6) | 821.6 | 331.2 |
| BMP(18:2_22:5) | BMP(40:7) | 819.6 | 329.2 |
| BMP(18:2_22:6) | BMP(40:8) | 817.6 | 327.2 |
| BMP(18:3_18:3) | BMP(36:6) | 765.6 | 277.2 |
| BMP(18:3_20:1) | BMP(38:4) | 797.6 | 309.2 |
| BMP(18:3_20:2) | BMP(38:5) | 795.6 | 307.2 |
| BMP(18:3_20:3) | BMP(38:6) | 793.6 | 305.2 |
| BMP(18:3_20:4) | BMP(38:7) | 791.6 | 303.2 |
| BMP(18:3_20:5) | BMP(38:8) | 789.6 | 301.2 |
| BMP(18:3_22:4) | BMP(40:7) | 819.6 | 331.2 |
| BMP(18:3_22:5) | BMP(40:8) | 817.6 | 329.2 |
| BMP(18:3_22:6) | BMP(40:9) | 815.6 | 327.2 |
| BMP(18:0e_14:0) | BMP(32:0) | 707.5 | 227.2 |
| BMP(18:0e_16:0) | BMP(34:0) | 735.6 | 255.2 |
| BMP(18:0e_18:0) | BMP(36:0) | 763.6 | 283.2 |
| BMP(18:0e_18:1) | BMP(36:1) | 761.6 | 281.2 |
| BMP(18:0e_18:2) | BMP(36:2) | 759.6 | 279.3 |
| BMP(18:0e_18:3) | BMP(36:3) | 757.6 | 277.2 |
| BMP(18:0e_20:3) | BMP(38:3) | 785.6 | 305.2 |
| BMP(18:0e_20:4) | BMP(38:4) | 783.6 | 303.2 |
| BMP(18:0e_20:5) | BMP(38:5) | 781.6 | 301.2 |
| BMP(18:0e_22:4) | BMP(40:4) | 811.6 | 331.3 |
| BMP(18:0e_22:6) | BMP(40:6) | 807.6 | 327.3 |
| BMP(18:1e_14:0) | BMP(32:1) | 705.5 | 227.2 |
| BMP(18:1e_16:0) | BMP(34:1) | 733.6 | 255.2 |
| BMP(18:1e_18:0) | BMP(36:1) | 761.6 | 283.2 |
| BMP(18:1e_18:1) | BMP(36:2) | 759.6 | 281.2 |
| BMP(18:1e_18:2) | BMP(36:3) | 757.6 | 279.3 |
| BMP(18:1e_18:3) | BMP(36:4) | 755.6 | 277.2 |
| BMP(18:1e_20:3) | BMP(38:4) | 783.6 | 305.2 |
| BMP(18:1e_20:4) | BMP(38:5) | 781.6 | 303.2 |
| BMP(18:1e_20:5) | BMP(38:6) | 779.6 | 301.2 |
| BMP(18:1e_22:4) | BMP(40:5) | 809.6 | 331.3 |
| BMP(18:1e_22:6) | BMP(40:7) | 805.6 | 327.3 |
| BMP(20:3_20:3) | BMP(40:6) | 821.6 | 305.2 |
| BMP(20:3_20:4) | BMP(40:7) | 819.6 | 303.2 |
| BMP(20:3_20:5) | BMP(40:8) | 817.6 | 301.2 |
| BMP(20:3_22:4) | BMP(42:7) | 847.6 | 331.3 |
| BMP(20:3_22:5) | BMP(42:8) | 845.6 | 329.3 |
| BMP(20:3_22:6) | BMP(42:9) | 843.6 | 327.3 |
| BMP(20:4_20:4) | BMP(40:8) | 817.6 | 303.2 |
| BMP(20:4_20:5) | BMP(40:9) | 815.6 | 301.2 |
| BMP(20:4_22:4) | BMP(42:8) | 845.6 | 331.3 |
| BMP(20:4_22:5) | BMP(42:9) | 843.6 | 329.3 |
| BMP(20:4_22:6) | BMP(42:10) | 841.6 | 327.3 |
| BMP(20:5_20:5) | BMP(40:10) | 813.6 | 301.2 |
| BMP(20:5_22:4) | BMP(42:9) | 843.6 | 331.3 |
| BMP(20:5_22:5) | BMP(42:10) | 841.6 | 329.3 |
| BMP(20:5_22:6) | BMP(42:11) | 839.6 | 327.3 |
| BMP(22:4_22:4) | BMP(44:8) | 873.6 | 331.3 |
| BMP(22:4_22:5) | BMP(44:9) | 871.6 | 329.3 |
| BMP(22:4_22:6) | BMP(44:10) | 869.6 | 327.3 |
| BMP(22:6_22:6) | BMP(44:12) | 865.6 | 327.2 |

### Example 15. Treatment of BMDMS from GRNKnockout Mice

[0575] BMDMs were derived in vitro from bone marrow of wild-type and GRN knockout mice using a similar method as in Trouplin et al. J. Vis. Exp. 2013 (81) 50966, but recombinant M-CSF was added directly to the cell growth media to induce differentiation. The BMDMs were treated for 72 hours with 50 nM Fc dimer:PGRN fusion proteins Fusion 11 and Fusion 12 of Table 1 or RSV (respiratory syncytial virus) control. Cellular lipids were extracted via addition of methanol containing an internal standard mixture and BMP abundance was measured by liquid chromatography-mass spectrometry (LC-MS/MS) on a Q-trap 6500 (SCIEX). As shown in FIGS. 13A and 13B, the abundance of BMP(18:1_18:1) and BMP(20:4_20:4) was increased in BMDMs from untreated GRN knockout mice compared to the wild-type control. Furthermore in separate experiments (three technical repetitions) as shown in FIGS. 13C and 13D, total BMP and BMP(18:1_18:1) abundance decreased in the GRN knockout BMDMs that were treated with either recombinant progranulin (Adipogen) or progranulin expressed by lentivirus.

[0576] BMP species that were found to have increased abundance in BMDMs derived from granulin (GRI) knockout animals are shown in Table 4. Species that exhibited particularly marked increases in abundance are marked with an asterisk.

TABLE 4
Elevated BMP Species in BMDM of GRN KO Mice
BMP

BMP(16:0_18:1)
BMP(16:0_18:2)
BMP(18:0_18:0)
BMP(18:0_18:1)
BMP(18:1_18:1)*
BMP(16:0_20:3)
BMP(18:1_20:2)
BMP(18:0_20:4)*
BMP(16:0_22:5)
BMP(20:4_20:4)*
BMP(22:6_22:6)*
BMP(20:4_20:5)
BMP(18:2_18:2)
BMP(16:0_20:4)
BMP(18:0_18:2)
BMP(18:0e_22:6)
BMP(18:1e_20:4)
BMP(20:4_22:6)*
BMP(18:0e_20:4)
BMP(18:2_20:4)
BMP(18:1_22:6)*
BMP(18:1_20:4)*
BMP(18:0_22:6)*

### Example 16. Treatment of GRN KO Mice to Rescue Phenotypes

[0577] Fusion 11 and Fusion 12 of Table 1 were injected via the tail vein into GRN WT and GRN KO mice to determine whether peripheral and CNS GRN KO phenotypes can be rescued following a single 50 mg/kg injection.

### Materials and Methods

[0578] Animals: The mice used for this study were obtained from JAX Laboratories and consisted of 21 GRN KO mice (n=12 males, n=9 females) and 10 GRN WT mice (n=5 males, n=5 females) age 3-5 months (Table 5). Animals were housed in standard conditions in the vivarium with ad libitum access to food and water at least 7 days prior to the initiation of the study.

TABLE 5
Study Design/Experimental Groups

| Genotype | Protein | Time points (h) | n/group |
|---|---|---|---|
| GRN KO | Vehicle | 0.5, 24, 48, 96 | 4 |
| | Vehicle | 0.5, 24 | 4 |
| | Fusion 11 | 0.5, 24, 48, 96 | 5 |
| | Fusion 11 | 0.5, 24 | 4 |
| | Fusion 12 | 0.5, 24, 48, 96 | 4 |
| WT | Vehicle | 0.5, 24, 48, 96 | 5 |
| | Vehicle | 0.5, 24 | 5 |

[0579] Animal allocation to experimental groups: Mice were distributed equally in each experimental group to account for differences across litters, gender, and age.

[0580] Formulation: Fc dimer:PGRN fusion proteins Fusion 11 and Fusion 12 were used at 5.05 mg/mL and 4.90 mg/mL saline, respectively.

[0581] Overall procedures: Experimental conditions were alternated when collecting tissues. Animal groups and sample collections were randomized.

[0582] In-life procedures: Submandibular bleeds were performed using 3 mm lancets (GoldenRod animal lancets). Plasma collection: Blood was collected in EDTA tubes (Sarstedt Microvette 500 K3E, Ref #201341102) and slowly inverted 10 times. For small volumes of blood (<100 μL), blood was collected in EDTA tubes with capillary tube (Sarstedt Microvette 100 K3E, Ref #201278100). EDTA tubes were immediately stored in the fridge until plasma preparation. The time between storage and preparation did not exceed 1 hour. The time of collection and time of processing were followed consistently. The tubes were centrifuged at 12,700 rpm for 7 minutes at 4° C. Plasma (top layer) was transferred to 0.6 mL Matrix tubes with rubber seal. Matrix tubes were snap frozen on dry ice before transferring to −80° C. Urine collection: Urine was collected by restraining mice in a plastic weigh boat, causing most of them to expel urine into the weigh boat. The urine was collected with a p200 pipet, transferred to 0.6 mL matrix tubes with rubber seal. Matrix tubes were snap frozen on dry ice before transferring to −80° C.

[0583] Terminal fluids/tissue collection procedures: Animals were deeply anesthetized via intraperitoneal (i.p.) injection of 2.5% Avertin and then tissues were collected in the order as described below:

[0584] Samples collected before intracardiac perfusion: Plasma collection: Blood was collected via cardiac puncture using a 1 mL Terumo tuberculin syringe attached to a 25 gauge needle (Ref #SS-01T2516) (Not pre-conditioned with EDTA). The needle was then detached and the blood was transferred to EDTA tubes (Sarstedt Microvette 500 K3E, Ref #201341102) and slowly inverted 10 times. Following this procedure, post collection methods were continued as described above in In-Life Procedures. Cerebrospinal fluid collection: The three muscle layers on the back of the neck were peeled back with small scissors and forceps and the area surrounding the revealed cisterna magna was cauterized to prevent contamination from blood, and the membrane was cleaned with a Q-tip and PBS. The membrane was dried and the cisterna magna was punctured with the tip of a 28% gauge insulin syringe needle. A p20 pipet was then quickly placed over the newly punctured hole and CSF drawn up into the pipet tip. CSF was placed in a 0.5 mL Lo-bind Eppendorf tube and spun at 12,700 rpm for 7 minutes at 4° C. The CSF supernatant was transferred to a 0.5 mL Lo-bind Eppendorf tube and snap frozen on dry ice before transferring to −80° C.

[0585] For samples collected after intracardiac perfusion, animals were transcardially perfused for 5 minutes with ice cold PBS using a peristaltic pump (Gilson Inc. Minipuls Evolution F110701) at a flow rate of 5 mL/minute. For tissues that could be dissected and pre-weighed during collection, the samples were placed directly into 1.5 mL Eppendorf tubes. Tissues were collected in the following order: Liver (post-perfusion): about 150 mg of liver was collected into 1.5 mL Eppendorf tubes. Eppendorf tubes were snap frozen on dry ice before transferring to −80° C. Eye: both eyes were removed, muscle and optic nerve removed, and eyes placed in a single 1.5 mL Eppendorf tube. Eppendorf tubes were snap frozen on dry ice before transferring to −80° C. Brain: right hemisphere without olfactory bulb and cerebellum was collected and weighed before placing in 1.5 mL Eppendorf tubes. Eppendorf tubes were snap frozen on dry ice before transferring to −80° C.

[0586] As shown in FIGS. 14-20, administration of Fc dimer:PGRN fusion proteins Fusion 11 and Fusion 12 was found to increase and restore BMP levels in the liver, plasma, urine, CSF, and brain.

### Example 17. Fusion Proteins Crossing the BBB

[0587] Fusion 11 and Fusion 12 of Table 1 were injected via the tail vein into GRNKO mice (Jackson Laboratory, Stock No. 013175) crossed with hTfR KI mice (GRN KO/hTfR.KI mice) to test their ability to cross the BBB. A description of the hTfR KI mice can be found in International Patent Publication No. WO2018152285. To generate GRN KO/hTfR.KI mice, in the first round of breeding, GRN heterozygous (GRN HET) mice were crossed to the TfR^{ms/hu} KI homozygous (TfR^{ms/hu}.KI HOM) mice to generate GRN HET x TfR^{ms/hu}.KI HET progeny. The GRN HET x TfR^{ms/hu}.KI HET mice were then crossed to the TfR^{ms/hu}.KI HOM mice to get GRN HET x TfR^{ms/hu}.KI HOM progeny in this second round. In the third and final round of breeding, GRN HET x TfR^{ms/hu}.KI HOM mice were crossed to GRN HET x TfR^{ms/hu}.KI HOM mice to generate the final GRNKO x TfR^{ms/hu}.KI HOM mice that were used in this study.

[0588] 2-3 months old GRN KO/hTfR.KI mice were dosed with 50 mg/kg intravenously via the tail vein with either sterile saline (vehicle), Fusion 7, Fusion 11, or Fusion 12 (Table 8). Mice were sedated with avertine 24 hours after the treatment and a cardiac puncture was performed to collect whole blood for plasma isolation. Animals were transcardially perfused with chilled 1×PBS at a rate of 5 mL/minute for 5-8 minutes, or until the livers were cleared of blood. A 100 mg portion of the liver was collected and the left hemisphere of the brain was collected and immediately snapped frozen on dry ice.

TABLE 8
Study Design/Experimental Groups

| | | | Dose | Time | | Material |
|---|---|---|---|---|---|---|
| Molecule | Cell Line | Genotype | (mg/kg) | point | N/group | (mg) |
| Saline | N/A | TfR.KI | N/A | −3 d, | 6 | N/A |
| | | | | 1 d* | | |
| Saline | N/A | GRN | N/A | −3 d, | 5 | N/A |
| | | KO/TfR.KI | | 1 d* | | |
| Fusion 11 | HEK | GRN | 50 | −3 d, | 5 | 18 |
| | | KO/TfR.KI | | 1 d* | | |
| Fusion 12 | HEK | GRN | 50 | −3 d, | 5 | 18 |
| | | KO/TfR.KI | | 1 d* | | |
| Fusion 7 | HEK | GRN | 50 | −3 d, | 4 | 18 |
| | | KO/TfR.KI | | 1 d* | | |

[0589] Tissue samples were weighed and were homogenized in 10× volume by weight cell lysis buffer (Cell Signaling Technologies; 20 mM Tris-HCl pH 7.5, 150 mM NaCl, 1 mM Na₂EDTA, 1 mM EGTA, 1% Triton, 2.5 mM sodium pyrophosphate, 1 mM beta-glycerophosphate, 1 mM Na₃VO₄, and 1 μg/mL leupeptin) supplemented with 1× protease inhibitor (Roche) and 1× phosphatase inhibitor (Roche). Samples were homogenized using the TissueLyzer with 3 mm metal beads for 2×3 min at 29 Hz. Following homogenization, samples were spun at maximum speed on the tabletop centrifuge for 20 minutes at 4° C. Supernatant was transferred to new tubes and the Fc-PGRN ELISA assay (Fc capture and PGRN detection ELISA) and Fc-Fc ELISA assay (Fc capture and Fc detection ELISA) were run using those samples.

[0590] The data in FIGS. 21A-21C shows that Fusion 11 and Fusion 12 were able to cross the BBB in the brain of GRN KO/hTfR.KI mice.

TABLE 6
CH3 Domain Modifications

| Clone name | Group | 384 | 385 | 386 | 387 | 388 | 389 | 390 | 391 | . . . | 413 | 414 | 415 | 416 | 417 | 418 | 419 | 420 | 421 |
|---|---|---|---|---|---|---|---|---|---|---|---|---|---|---|---|---|---|---|---|
| Wild-type | n/a | N | G | Q | P | E | N | N | Y | . . . | D | K | S | R | W | Q | Q | G | N |
| 1 | | L | G | L | V | W | V | G | Y | . . . | A | K | S | T | W | Q | Q | G | W |
| 2 | | Y | G | Y | V | W | S | H | Y | . . . | S | K | S | E | W | Q | Q | G | Y |
| 3 | | Y | G | T | E | W | S | Q | Y | . . . | E | K | S | D | W | Q | Q | G | H |
| 4 | | V | G | T | P | W | A | L | Y | . . . | L | K | S | E | W | Q | Q | G | W |
| 17 | 2 | Y | G | T | V | W | S | K | Y | . . . | S | K | S | E | W | Q | Q | G | F |
| 18 | 1 | L | G | H | V | W | A | V | Y | . . . | P | K | S | T | W | Q | Q | G | W |
| 21 | 1 | L | G | L | V | W | V | G | Y | . . . | P | K | S | T | W | Q | Q | G | W |
| 25 | 1 | M | G | H | V | W | V | G | Y | . . . | D | K | S | T | W | Q | Q | G | W |
| 34 | 1 | L | G | L | V | W | V | F | S | . . . | P | K | S | T | W | Q | Q | G | W |
| 35 | 2 | Y | G | T | E | W | S | S | Y | . . . | T | K | S | E | W | Q | Q | G | F |
| 44 | 2 | Y | G | T | E | W | S | N | Y | . . . | S | K | S | E | W | Q | Q | G | F |
| 51 | ½ | L | G | H | V | W | V | G | Y | . . . | S | K | S | E | W | Q | Q | G | W |
| 3.1-3 | 1 | L | G | H | V | W | V | A | T | . . . | P | K | S | T | W | Q | Q | G | W |
| 3.1-9 | 1 | L | G | P | V | W | V | H | T | . . . | P | K | S | T | W | Q | Q | G | W |
| 3.2-5 | 1 | L | G | H | V | W | V | D | Q | . . . | P | K | S | T | W | Q | Q | G | W |
| 3.2-19 | 1 | L | G | H | V | W | V | N | Q | . . . | P | K | S | T | W | Q | Q | G | W |
| 3.2-1 | 1 | L | G | H | V | W | V | N | F | . . . | P | K | S | T | W | Q | Q | G | W |

TABLE 7
Additional CH3 Domain Modifications

| Clone name | 378 | 379 | 380 | 381 | 382 | 383 | 384 | 385 | 386 | 387 | 388 | 389 | 390 | 391 | 392 | 411 | 412 | 413 | 414 | 415 | 416 | 417 | 418 | 419 | 420 | 421 | 422 | 423 |
|---|---|---|---|---|---|---|---|---|---|---|---|---|---|---|---|---|---|---|---|---|---|---|---|---|---|---|---|---|
| Wild-type | A | V | E | W | E | S | N | G | Q | P | E | N | N | Y | K | T | V | D | K | S | R | W | Q | Q | G | N | V | F |
| 35.20.1 | . | . | . | . | . | . | F | . | T | E | W | S | S | . | . | . | . | T | . | E | E | . | . | . | . | F | . | . |
| 35.20.2 | . | . | . | . | . | . | Y | . | T | E | W | A | S | . | . | . | . | T | . | E | E | . | . | . | . | F | . | . |
| 35.20.3 | . | . | . | . | . | . | Y | . | T | E | W | V | S | . | . | . | . | T | . | E | E | . | . | . | . | F | . | . |
| 35.20.4 | . | . | . | . | . | . | Y | . | T | E | W | S | S | . | . | . | . | S | . | E | E | . | . | . | . | F | . | . |
| 35.20.5 | . | . | . | . | . | . | F | . | T | E | W | A | S | . | . | . | . | T | . | E | E | . | . | . | . | F | . | . |
| 35.20.6 | . | . | . | . | . | . | F | . | T | E | W | V | S | . | . | . | . | T | . | E | E | . | . | . | . | F | . | . |
| 35.21.a.1 | . | . | W | . | . | . | F | . | T | E | W | S | S | . | . | . | . | T | . | E | E | . | . | . | . | F | . | . |
| 35.21.a.2 | . | . | W | . | . | . | Y | . | T | E | W | A | S | . | . | . | . | T | . | E | E | . | . | . | . | F | . | . |
| 35.21.a.3 | . | . | W | . | . | . | Y | . | T | E | W | V | S | . | . | . | . | T | . | E | E | . | . | . | . | F | . | . |
| 35.21.a.4 | . | . | W | . | . | . | Y | . | I | E | W | S | S | . | . | . | . | S | . | E | E | . | . | . | . | F | . | . |
| 35.21.a.5 | . | . | W | . | . | . | F | . | I | E | W | A | S | . | . | . | . | T | . | E | E | . | . | . | . | F | . | . |
| 35.21.a.6 | . | . | W | . | . | . | F | . | I | E | W | V | S | . | . | . | . | T | . | E | E | . | . | . | . | F | . | . |
| 35.23.1 | . | . | . | . | . | . | F | . | I | E | W | S | . | . | . | . | . | T | . | E | E | . | . | . | . | F | . | . |
| 35.23.2 | . | . | . | . | . | . | Y | . | T | E | W | A | . | . | . | . | . | T | . | E | E | . | . | . | . | F | . | . |
| 35.23.3 | . | . | . | . | . | . | Y | . | T | E | W | V | . | . | . | . | . | T | . | E | E | . | . | . | . | F | . | . |
| 35.23.4 | . | . | . | . | . | . | Y | . | T | E | W | S | . | . | . | . | . | S | . | E | E | . | . | . | . | F | . | . |
| 35.23.5 | . | . | . | . | . | . | F | . | T | E | W | A | . | . | . | . | . | T | . | E | E | . | . | . | . | F | . | . |
| 35.23.6 | . | . | . | . | . | . | F | . | T | E | W | V | . | . | . | . | . | T | . | E | E | . | . | . | . | F | . | . |
| 35.24.1 | . | . | W | . | . | . | F | . | T | E | W | S | . | . | . | . | . | T | . | E | E | . | . | . | . | F | . | . |
| 35.24.2 | . | . | W | . | . | . | Y | . | T | E | W | A | . | . | . | . | . | T | . | E | E | . | . | . | . | F | . | . |
| 35.24.3 | . | . | W | . | . | . | Y | . | T | E | W | V | . | . | . | . | . | T | . | E | E | . | . | . | . | F | . | . |
| 35.24.4 | . | . | W | . | . | . | Y | . | T | E | W | S | . | . | . | . | . | S | . | E | E | . | . | . | . | F | . | . |
| 35.24.5 | . | . | W | . | . | . | F | . | T | E | W | A | . | . | . | . | . | T | . | E | E | . | . | . | . | F | . | . |
| 35.24.6 | . | . | W | . | . | . | F | . | T | E | W | V | . | . | . | . | . | T | . | E | E | . | . | . | . | F | . | . |
| 35.21.17.1 | . | . | L | . | . | . | F | . | T | E | W | S | S | . | . | . | . | T | . | E | E | . | . | . | . | F | . | . |
| 35.21.17.2 | . | . | L | . | . | . | Y | . | T | E | W | A | S | . | . | . | . | T | . | E | E | . | . | . | . | F | . | . |
| 35.21.17.3 | . | . | L | . | . | . | Y | . | T | E | W | V | S | . | . | . | . | T | . | E | E | . | . | . | . | F | . | . |
| 35.21.17.4 | . | . | L | . | . | . | Y | . | T | E | W | S | S | . | . | . | . | S | . | E | E | . | . | . | . | F | . | . |
| 35.21.17.5 | . | . | L | . | . | . | F | . | T | E | W | A | S | . | . | . | . | T | . | E | E | . | . | . | . | F | . | . |
| 35.21.17.6 | . | . | L | . | . | . | F | . | T | E | W | V | S | . | . | . | . | T | . | E | E | . | . | . | . | F | . | . |
| 35.20 | . | . | . | . | . | . | Y | . | T | E | W | S | S | . | . | . | . | T | . | E | E | . | . | . | . | F | . | . |
| 35.21 | . | . | W | . | . | . | Y | . | T | E | W | S | S | . | . | . | . | T | . | E | E | . | . | . | . | F | . | . |
| 35.22 | . | . | W | . | . | . | Y | . | T | E | W | S | . | . | . | . | . | T | . | . | E | . | . | . | . | F | . | . |
| 35.23 | . | . | . | . | . | . | Y | . | T | E | W | S | . | . | . | . | . | T | . | E | E | . | . | . | . | F | . | . |
| 35.24 | . | . | W | . | . | . | Y | . | T | E | W | S | . | . | . | . | . | T | . | E | E | . | . | . | . | F | . | . |
| 35.21.17 | . | . | L | . | . | . | Y | . | T | E | W | S | S | . | . | . | . | T | . | E | E | . | . | . | . | F | . | . |
| 35.N390 | . | . | . | . | . | . | Y | . | T | E | W | S | . | . | . | . | . | T | . | . | E | . | . | . | . | F | . | . |

[0591] It is understood that the examples and embodiments described herein are for illustrative purposes only and that various modifications or changes in light thereof will be suggested to persons skilled in the art and are to be included within the spirit and purview of this application and scope of the appended claims. The sequences of the sequence accession numbers cited herein are hereby incorporated by reference.

| SEQ ID | | |
|---|---|---|
| NO: | Sequence | Description |
| 1 | APELLGGPSVFLFPPKPKDTLMISRTPEVTCVVVDVSHEDPEVKFN | Wild-type human Fc |
| | WYVDGVEVHNAKTKPREEQYNSTYRVVSVLTVLHQDWLNGKEY | sequence |
| | KCKVSNKALPAPIEKTISKAKGQPREPQVYTLPPSRDELTKNQVSLT | positions 231-447 EU |
| | CLVKGFYPSDIAVEWESNGQPENNYKTTPPVLDSDGSFFLYSKLTV | index numbering |
| | DKSRWQQGNVFSCSVMHEALHNHYTQKSLSLSPGK | |
| 2 | APELLGGPSVFLFPPKPKDTLMISRTPEVTCVVVDVSHEDPEVKFN | CH2 domain sequence |
| | WYVDGVEVHNAKTKPREEQYNSTYRVVSVLTVLHQDWLNGKEY | positions 231-340 EU |
| | KCKVSNKALPAPIEKTISKAK | index numbering |
| 3 | GQPREPQVYTLPPSRDELTKNQVSLTCLVKGFYPSDIAVEWESNGQ | CH3 domain sequence |
| | PENNYKTTPPVLDSDGSFFLYSKLTVDKSRWQQGNVFSCSVMHEA | Positions 341-447 EU |
| | LHNHYTQKSLSLSPGK | index numbering |
| 4 | APELLGGPSVFLFPPKPKDTLMISRTPEVTCVVVDVSHEDPEVKFN | Clone CH3C.1 |
| | WYVDGVEVHNAKTKPREEQYNSTYRVVSVLTVLHQDWLNGKEY | |
| | KCKVSNKALPAPIEKTISKAKGQPREPQVYTLPPSRDELTKNQVSLT | |
| | CLVKGFYPSDIAVEWESLGLVWVGYKTTPPVLDSDGSFFLYSKLTV | |
| | AKSTWQQGWVFSCSVMHEALHNHYTQKSLSLSPGK | |
| 5 | APELLGGPSVFLFPPKPKDTLMISRTPEVTCVVVDVSHEDPEVKFN | Clone CH3C.2 |
| | WYVDGVEVHNAKTKPREEQYNSTYRVVSVLTVLHQDWLNGKEY | |
| | KCKVSNKALPAPIEKTISKAKGQPREPQVYTLPPSRDELTKNQVSLT | |
| | CLVKGFYPSDIAVEWESYGTVWSHYKTTPPVLDSDGSFFLYSKLTV | |
| | SKSEWQQGYVFSCSVMHEALHNHYTQKSLSLSPGK | |
| 6 | APELLGGPSVFLFPPKPKDTLMISRTPEVTCVVVDVSHEDPEVKFN | Clone CH3C.3 |
| | WYVDGVEVHNAKTKPREEQYNSTYRVVSVLTVLHQDWLNGKEY | |
| | KCKVSNKALPAPIEKTISKAKGQPREPQVYTLPPSRDELTKNQVSLT | |
| | CLVKGFYPSDIAVEWESYGTEWSQYKTTPPVLDSDGSFFLYSKLTV | |
| | EKSDWQQGHVFSCSVMHEALHNHYTQKSLSLSPGK | |
| 7 | APELLGGPSVFLFPPKPKDTLMISRTPEVTCVVVDVSHEDPEVKFN | Clone CH3C.4 |
| | WYVDGVEVHNAKTKPREEQYNSTYRVVSVLTVLHQDWLNGKEY | |
| | KCKVSNKALPAPIEKTISKAKGQPREPQVYTLPPSRDELTKNQVSLT | |
| | CLVKGFYPSDIAVEWESVGTPWALYKTTPPVLDSDGSFFLYSKLTV | |
| | LKSEWQQGWVFSCSVMHEALHNHYTQKSLSLSPGK | |
| 8 | APELLGGPSVFLFPPKPKDTLMISRTPEVTCVVVDVSHEDPEVKFN | Clone CH3C.17 |
| | WYVDGVEVHNAKTKPREEQYNSTYRVVSVLTVLHQDWLNGKEY | |
| | KCKVSNKALPAPIEKTISKAKGQPREPQVYTLPPSRDELTKNQVSLT | |
| | CLVKGFYPSDIAVEWESYGTVWSKYKTTPPVLDSDGSFFLYSKLTV | |
| | SKSEWQQGFVFSCSVMHEALHNHYTQKSLSLSPGK | |
| 9 | APELLGGPSVFLFPPKPKDTLMISRTPEVTCVVVDVSHEDPEVKFN | Clone CH3C.18 |
| | WYVDGVEVHNAKTKPREEQYNSTYRVVSVLTVLHQDWLNGKEY | |
| | KCKVSNKALPAPIEKTISKAKGQPREPQVYTLPPSRDELTKNQVSLT | |
| | CLVKGFYPSDIAVEWESLGHVWAVYKTTPPVLDSDGSFFLYSKLTV | |
| | PKSTWQQGWVFSCSVMHEALHNHYTQKSLSLSPGK | |
| 10 | APELLGGPSVFLFPPKPKDTLMISRTPEVTCVVVDVSHEDPEVKFN | Clone CH3C.21 |
| | WYVDGVEVHNAKTKPREEQYNSTYRVVSVLTVLHQDWLNGKEY | |
| | KCKVSNKALPAPIEKTISKAKGQPREPQVYTLPPSRDELTKNQVSLT | |
| | CLVKGFYPSDIAVEWESLGLVWVGYKTTPPVLDSDGSFFLYSKLTV | |
| | PKSTWQQGWVFSCSVMHEALHNHYTQKSLSLSPGK | |
| 11 | APELLGGPSVFLFPPKPKDTLMISRTPEVTCVVVDVSHEDPEVKFN | Clone CH3C.25 |
| | WYVDGVEVHNAKTKPREEQYNSTYRVVSVLTVLHQDWLNGKEY | |
| | KCKVSNKALPAPIEKTISKAKGQPREPQVYTLPPSRDELTKNQVSLT | |
| | CLVKGFYPSDIAVEWESMGHVWVGYKTTPPVLDSDGSFFLYSKLT | |
| | VDKSTWQQGWVFSCSVMHEALHNHYTQKSLSLSPGK | |
| 12 | APELLGGPSVFLFPPKPKDTLMISRTPEVTCVVVDVSHEDPEVKFN | Clone CH3C.34 |
| | WYVDGVEVHNAKTKPREEQYNSTYRVVSVLTVLHQDWLNGKEY | |
| | KCKVSNKALPAPIELTISKAKGQPREPQVYTLPPSRDELTKNQVSLT | |
| | CLVKGFYPSDIAVEWESLGLVWVFSKTTPPVLDSDGFFLYSKLTV | |
| | PKSTWQQGWVFSCSVMHEALHNHYTQKSLSLSPGK | |
| 13 | APELLGGPSVFLFPPKPKDTLMISRTPEVTCVVVDVSHEDPEVKFN | Clone CH3C.35 |
| | WYVDGVEVHNAKTKPREEQYNSTYRVVSVLTVLHQDWLNGKEY | |
| | KCKVSNKALPAPIEKTISKAKGQPREPQVYTLPPSRDELTKNQVSLT | |
| | CLVKGFYPSDIAVEWESYGTEWSSYKTTPPVLDSDGSFFLYSKLTV | |
| | TKSEWQQGFVFSCSVMHEALHNHYTQKSLSLSPGK | |
| 14 | APELLGGPSVFLFPPKPKDTLMISRTPEVTCVVVDVSHEDPEVKFN | Clone CH3C.44 |
| | WYVDGVEVHNAKTKPREEQYNSTYRVVSVLTVLHQDWLNGKEY | |
| | KCKVSNKALPAPIEKTISKAKGQPREPQVYTLPPSRDELTKNQVSLT | |
| | CLVKGFYPSDIAVEWESYGTEWSNYKTTPPVLDSDGSFFLYSKLTV | |
| | SKSEWQQGFVFSCSVMHEALHNHYTQKSLSLSPGK | |
| 15 | APELLGGPSVFLFPPKPKDTLMISRTPEVTCVVVDVSHEDPEVKFN | Clone CH3C.51 |
| | WYVDGVEVHNAKTKPREEQYNSTYRVVSVLTVLHQDWLNGKEY | |
| | KCKVSNKALPAPIEKTISKAKGQPREPQVYTLPPSRDELTKNQVSLT | |
| | CLVKGFYPSDIAVEWESLGHVWVGYKTTPPVLDSDGSFFLYSKLTV | |
| | SKSEWQQGWVFSCSVMHEALHNHYTQKSLSLSPGK | |
| 16 | APELLGGPSVFLFPPKPKDTLMISRTPEVTCVVVDVSHEDPEVKFN | Clone CH3C.3.1-3 |
| | WYVDGVEVHNAKTKPREEQYNSTYRVVSVLTVLHQDWLNGKEY | |
| | KCKVSNKALPAPIEKTISKAKGQPREPQVYTLPPSRDELTKNQVSLT | |
| | CLVKGFYPSDIAVEWESLGHVWVATKTTPPVLDSDGSFFLYSKLTV | |
| | PKSTWQQGWVFSCSVMHEALHNHYTQKSLSLSPGK | |
| 17 | APELLGGPSVFLFPPKPKDTLMISRTPEVTCVVVDVSHEDPEVKFN | Clone CH3C.3.1-9 |
| | WYVDGVEVHNAKTKPREEQYNSTYRVVSVLTVLHQDWLNGKEY | |
| | KCKVSNKALPAPIEKTISKAKGQPREPQVYTLPPSRDELTKNQVSLT | |
| | CLVKGFYPSDIAVEWESLGPVWVHTKTTPPVLDSDGSFFLYSKLTV | |
| | PKSTWQQGWVFSCSVMHEALHNHYTQKSLSLSPGK | |
| 18 | APELLGGPSVFLFPPKPKDTLMISRTPEVTCVVVDVSHEDPEVKFN | Clone CH3C.3.2-5 |
| | WYVDGVEVHNAKTKPREEQYNSTYRVVSVLTVLHQDWLNGKEY | |
| | KCKVSNKALPAPIEKTISKAKGQPREPQVYTLPPSRDELTKNQVSLT | |
| | CLVKGFYPSDIAVEWESLGHVWVDQKTTPPVLDSDGSFFLYSKLTV | |
| | PKSTWQQGWVFSCSVMHEALHNHYTQKSLSLSPGK | |
| 19 | APELLGGPSVFLFPPKPKDTLMISRTPEVTCVVVDVSHEDPEVKFN | Clone CH3C.3.2-19 |
| | WYVDGVEVHNAKTKPREEQYNSTYRVVSVLTVLHQDWLNGKEY | |
| | KCKVSNKALPAPIEKTISKAKGQPREPQVYTLPPSRDELTKNQVSLT | |
| | CLVKGFYPSDIAVEWESLGHVWVNQKTTPPVLDSDGSFFLYSKLTV | |
| | PKSTWQQGWVFSCSVMHEALHNHYTQKSLSLSPGK | |
| 20 | APELLGGPSVFLFPPKPKDTLMISRTPEVTCVVVDVSHEDPEVKFN | Clone CH3C.3.2-1 |
| | WYVDGVEVHNAKTKPREEQYNSTYRVVSVLTVLHQDWLNGKEY | |
| | KCKVSNKALPAPIEKTISKAKGQPREPQVYTLPPSRDELTKNQVSLT | |
| | CLVKGFYPSDIAVEWESLGHVWVNFKTTPPVLDSDGSFFLYSKLTV | |
| | PKSTWQQGWVFSCSVMHEALHNHYTQKSLSLSPGK | |
| 21 | APELLGGPSVFLFPPKPKDTLMISRTPEVTCVVVDVSHEDPEVKFN | Clone CH3C.18 variant |
| | WYVDGVEVHNAKTKPREEQYNSTYRVVSVLTVLHQDWLNGKEY | |
| | KCKVSNKALPAPIEKTISKAKGQPREPQVYTLPPSRDELTKNQVSLT | |
| | CLVKGFYPSDIAVWWESLGHVWAVYKTTPPVLDSDGSFFLYSKLT | |
| | VPKSTWQQGWVFSCSVMHEALHNHYTQKSLSLSPGK | |
| 22 | APELLGGPSVFLFPPKPKDTLMISRTPEVTCVVVDVSHEDPEVKFN | Clone CH3C.18 variant |
| | WYVDGVEVHNAKTKPREEQYNSTYRVVSVLTVLHQDWLNGKEY | |
| | KCKVSNKALPAPIEKTISKAKGQPREPQVYTLPPSRDELTKNQVSLT | |
| | CLVKGFYPSDIAVLWESLGHVWAVYKTTPPVLDSDGSFFLYSKLTV | |
| | PKSTWQQGWVFSCSVMHEALHNHYTQKSLSLSPGK | |
| 23 | APELLGGPSVFLFPPKPKDTLMISRTPEVTCVVVDVSHEDPEVKFN | Clone CH3C.18 variant |
| | WYVDGVEVHNAKTKPREEQYNSTYRVVSVLTVLHQDWLNGKEY | |
| | KCKVSNKALPAPIEKTISKAKGQPREPQVYTLPPSRDELTKNQVSLT | |
| | CLVKGFYPSDIAVYWESLGHVWAVYKTTPPVLDSDGSFFLYSKLT | |
| | VPKSTWQQGWVFSCSVMHEALHNHYTQKSLSLSPGK | |
| 24 | APELLGGPSVFLFPPKPKDTLMISRTPEVTCVVVDVSHEDPEVKFN | Clone CH3C.18 variant |
| | WYVDGVEVHNAKTKPREEQYNSTYRVVSVLTVLHQDWLNGKEY | |
| | KCKVSNKALPAPIEKTISKAKGQPREPQVYTLPPSRDELTKNQVSLT | |
| | CLVKGFYPSDIAVEWESLGHVWAVYQTTPPVLDSDGSFFLYSKLTV | |
| | PKSTWQQGWVFSCSVMHEALHNHYTQKSLSLSPGK | |
| 25 | APELLGGPSVFLFPPKPKDTLMISRTPEVTCVVVDVSHEDPEVKFN | Clone CH3C.18 variant |
| | WYVDGVEVHNAKTKPREEQYNSTYRVVSVLTVLHQDWLNGKEY | |
| | KCKVSNKALPAPIEKTISKAKGQPREPQVYTLPPSRDELTKNQVSLT | |
| | CLVKGFYPSDIAVEWESLGHVWAVYFTTPPVLDSDGSFFLYSKLTV | |
| | PKSTWQQGWVFSCSVMHEALHNHYTQKSLSLSPGK | |
| 26 | APELLGGPSVFLFPPKPKDTLMISRTPEVTCVVVDVSHEDPEVKFN | Clone CH3C.18 variant |
| | WYVDGVEVHNAKTKPREEQYNSTYRVVSVLTVLHQDWLNGKEY | |
| | KCKVSNKALPAPIEKTISKAKGQPREPQVYTLPPSRDELTKNQVSLT | |
| | CLVKGFYPSDIAVEWESLGHVWAVHTTPPVLDSDGSFFLYSKLTV | |
| | PKSTWQQGWVFSCSVMHEALHNHYTQKSLSLSPGK | |
| 27 | APELLGGPSVFLFPPKPKDTLMISRTPEVTCVVVDVSHEDPEVKFN | Clone CH3C.35.13 |
| | WYVDGVEVHNAKTKPREEQYNSTYRVVSVLTVLHQDWLNGKEY | |
| | KCKVSNKALPAPIEKTISKAKGQPREPQVYTLPPSRDELTKNQVSLT | |
| | CLVKGFYPSDIAVWWESLGHVWAVYKTTPPVLDSDGSFFLYSKLT | |
| | VPKSTWQQGWVFSCSVMHEALHNHYTQKSLSLSPGK | |
| 28 | APELLGGPSVFLFPPKPKDTLMISRTPEVTCVVVDVSHEDPEVKFN | Clone CH3C.35.14 |
| | WYVDGVEVHNAKTKPREEQYNSTYRVVSVLTVLHQDWLNGKEY | |
| | KCKVSNKALPAPIEKTISKAKGQPREPQVYTLPPSRDELTKNQVSLT | |
| | CLVKGFYPSDIAVEWESLGHVWAVYQTTPPVLDSDGSFFLYSKLTV | |
| | PKSTWQQGWVFSCSVMHEALHNHYTQKSLSLSPGK | |
| 29 | APELLGGPSVFLFPPKPKDTLMISRTPEVTCVVVDVSHEDPEVKFN | Clone CH3C.35.15 |
| | WYVDGVEVHNAKTKPREEQYNSTYRVVSVLTVLHQDWLNGKEY | |
| | KCKVSNKALPAPIEKTISKAKGQPREPQVYTLPPSRDELTKNQVSLT | |
| | CLVKGFYPSDIAVWWESLGHVWAVYQTTPPVLDSDGSFFLYSKLT | |
| | VPKSTWQQGWVFSCSVMHEALHNHYTQKSLSLSPGK | |
| 30 | APELLGGPSVFLFPPKPKDTLMISRTPEVTCVVVDVSHEDPEVKFN | Clone CH3C.35.16 |
| | WYVDGVEVHNAKTKPREEQYNSTYRVVSVLTVLHQDWLNGKEY | |
| | KCKVSNKALPAPIEKTISKAKGQPREPQVYTLPPSRDELTKNQVSLT | |
| | CLVKGFYPSDIAVEEWSLGHVWVNQKTTPPVLDSDGSFFLYSKLT | |
| | VPKSTWQQGWVFSCSVMHEALHNHYTQKSLSLSPGK | |
| 31 | APELLGGPSVFLFPPKPKDTLMISRTPEVTCVVVDVSHEDPEVKFN | Clone CH3C.35.17 |
| | WYVDGVEVHANKTKPREEQYNSTYRVVSVLTVLHQDWLNGKEY | |
| | KCKVSNKALPAPIEKTISKAKGQPREPQVYTLPPSRDELTKNQVSLT | |
| | CLVKGFYPSDIAVEWESLGHVEVNQQTTPPVLDSDGSFFLYSKLTV | |
| | PKSTWQQGWVFSCSVMHEALHNHYTQKSLSLSPGK | |
| 32 | APELLGGPSVFLFPPKPKDTLMISRTPEVTCVVVDVSHEDPEVKFN | Clone CH3C.35.18 |
| | WYVDGVEVHNAKTKPREEQYNSTYRVVSVLTVLHQDWLNGKEY | |
| | KCKVSNKALPAPIEKTISKAKGQPREPQVYTLPPSRDELTKNQVSLT | |
| | CLVKGFYPSDIAVWWESLGHVWVNQQTTPPVLDSDGSFFLYSKLT | |
| | VPKSTWQQGWVFSCSVMHEALHNHYTQKSLSLSPGK | |
| 33 | APELLGGPSVFLFPPKPKDTLMISRTPEVTCVVVDVSHEDPEVKFN | Clone CH3C.35.19 |
| | WYVDGVEVHNAKTKPREEQYNSTYRVVSVLTVLHQDWLNGKEY | |
| | KCKVSNKALPAPIEKTISKAKGQPREPQVYTLPPSRDELTKNQVSLT | |
| | CLVKGFYPSDIAVWWESYGTEWSSYKTTPPVLDSDGSFFLYSKLTV | |
| | TKSEWQQGFVFSCSVMHEALHNHYTQKSLSLSPGK | |
| 34 | APELLGGPSVFLFPPKPKDTLMISRTPEVTCVVVDVSHEDPEVKFN | Clone CH3C.35.20 |
| | WYVDGVEVHNAKTKPREEQYNSTYRVVSVLTVLHQDWLNGKEY | |
| | KCKVSNKALPAPIEKTISKAKGQPREPQVYTLPPSRDELTKNQVSLT | |
| | CLVKGFYPSDIAVEWESYGTEWSSYKTTPPVLDSDGSFFLYSKLTV | |
| | TKEEWQQGFVFSCSVMHEALHNHYTQKSLSLSPGK | |
| 35 | APELLGGPSVFLFPPKPDKTLMISRTPEVTCVVVDVSHEDPEVKFN | Clone CH3C.35.21 |
| | WYVDGVEVHNAKTKPREEQYNSTYRVVSVLTVLHQDWLNGKEY | |
| | KCKVSNKALPAPIEKTISKAKGQPREPQVYTLPPSRDELTKNQVSLT | |
| | CLVKGFYPSDIAVWWESYGTEWSSYKTTPPVLDSDGSFFLYSKLTV | |
| | TKEEWQQGFVFSCSVMHEALHNHYTQKSLSLSPGK | |
| 36 | APELLGGPSVFLFPPKPKDTLMISRTPEVTCVVVDVSHEDPEVKFN | Clone CH3C.35.22 |
| | WYVDGVEVHNAKTKPREEQYNSTYRVVSVLTVLHQDWLNGKEY | |
| | KCKVSNKALPAPIEKTISKAKGQPREPQVYTLPPSRDELTKNQVSLT | |
| | CLVKGFYPSDIAVWWESYGTEWSNYKTTPPVLDSDGSFFLYSKLTV | |
| | TKSEWQQGFVFSCSVMHEALHNHYTQKSLSLSPGK | |
| 37 | APELLGGPSVFLFPPKPKDTLMISRTPEVTCVVVDVSHEDPEVKFN | Clone CH3C.35.23 |
| | WYVDGVEVHNAKTKPREEQYNSTYRVVSVLTVLHQDWLNGKEY | |
| | KCKVSNKALPAPIEKTISKAKGQPREPQVYTLPPSRDELTKNQVSLT | |
| | CLVKGFYPSDIAVEWESYGTEWSNYKTTPPVLDSDGSFFLYSKLTV | |
| | TKEEWQQGFVFSCSVMHEALHNHYTQKSLSLSPGK | |
| 38 | APELLGGPSVFLPPKPKDTLMISTPEVTCVVVDVSHEDPEVKFN | Clone CH3C.35.24 |
| | WYVDGVEVHNAKTKPREEQYNSTYRVVSVLTVLHQDWLNGKEY | |
| | KCKVSNKALPAPIEKTISKAKGQPREPQVYTLPPSRDELTKNQVSLT | |
| | CLVKGFYPSDIAVWWESYGTEWSNYKTTPPVLDSDGSFFLYSKLTV | |
| | TKEEWQQGFVFSCSVMHEALHNHYTQKSLSLSPGK | |
| 39 | APELLGGPSVFLFPPKPKDTLMISRTPEVTCVVVDVSHEDPEVKFN | Clone CH3C.35.N163 |
| | WYVDGVEVHNAKTKPREEQYNSTYRVVSVLTVLHQDWLNGKEY | |
| | KCKVSNKALPAPIEKTISKAKGQPREPQVYTLPPSRDELTKNQVSLT | |
| | CLVKGFYPSDIAVEWESYGTEWSNYKTTPPVLDSDGSFFLYSKLTV | |
| | TKSEWQQGFVFSCSVMHEALHNHYTQKSLSLSPGK | |
| 40 | APELLGGPSVFLFPPKPKDTLMISRTPEVTCVVVDVSHEDPEVKFN | Clone CH3C.35.K165Q |
| | WYVDGVEVHNAKTKPREEQYNSTYRVVSVLTVLHQDWLNGKEY | |
| | KCKVSNKALPAPIEKTISKAKGQPREPQVYTLPPSRDELTKNQVSLT | |
| | CLVKGFYPSDIAVEWESYGTEWSSYQTTPPVLDSDGSFFLYSKLTV | |
| | TKSEWQQGFVFSCSVMHEALHNHYTQKSLSLSPGK | |
| 41 | APELLGGPSVFLFPPKPKDTLMISRTPEVTCVVVDVSHEDPEVKFN | Clone CHEC.35.N163.K165Q |
| | WYVDGVEVHNAKTKPREEQYNSTYRVVSVLTVLHQDWLNGKEY | |
| | KCKVSNKALPAPIEKTISKAKGQPREPQVYTLPPSRDELTKNQVSLT | |
| | CLVKGFYPSDIAVEWESYGTEWSNYQTTPPVLDSDGSFFLYSKLTV | |
| | TKSEWQQGFVFSCSVMHEALHNHYTQKSLSLSPGK | |
| 42 | APELLGGPSVFLFPPKPKDTLMISRTPEVTCVVVDVSHEDPEVKFN | Clone CH3C.35.21.1 |
| | WYVDGVEVHNAKTKPREEQYNSTYRVVSVLTVLHQDWLNGKEY | |
| | KCKVSNKALPAPIEKTISKAKGQPREPQVYTLPPSRDELTKNQVSLT | |
| | CLVKGFYPSDIAVLWESYGTEWSSYKTTPPVLDSDGFFLYSKLTV | |
| | TKSEWQQGFVFSCSVMHEALHNHYTQKSLSLSPGK | |
| 43 | APELLGGPSVFLFPPKPKDTLMISRTPEVTCVVVDVSHEDPEVKFN | CH3C.35.21.2 |
| | WYVDGVEVHNAKTKPREEQYNSTYRVVSVLTVLHQDWLNGKEY | |
| | KCKVSNKALPAPIEKTISKAKGQPREPQVYTLPPSRDELTKNQVSLT | |
| | CLVKGFYPSDIAVLWESYGTEWSSYRTTPPVLDSDGSFFLYSKLTV | |
| | TKSEWQQGFVFSCSVMHEALHNHYTQKSLSLSPGK | |
| 44 | APELLGGPSVFLFPPKPKDTLMISRTPEVTCVVVDVSHEDPEVKFN | Clone CH3C.35.21.3 |
| | WYVDGVEVHNAKTKPREEQYNSTYRVVSVLTVLHQDWLNGKEY | |
| | KCKVSNKALPAPIEKTISKAKGQPREPQVYTLPPSRDELTKNQVSLT | |
| | CLVKGFYPSDIAVLWESYGTEWSSYRTTPPVLDSDGSFFLYSKLTV | |
| | TREEWQQGFVFSCSVMHEALHNHYTQKSLSLSPGK | |
| 45 | APELLGGPSVFLFPPKPKDTLMISRTPEVTCVVVDVSHEDPEVKFN | Clone CH3C.35.21.4 |
| | WYVDGVEVHNAKTKPREEQYNSTYRVVSVLTVLHQDWLNGKEY | |
| | KCKVSNKALPAPIEKTISKAKGQPREPQVYTLPPSRDELTKNQVSLT | |
| | CLVKGFYPSDIAVLWESYGTEWSSYRTTPPVLDSDGSFFLYSKLTV | |
| | TGEEWQQGFVFSCSVMHEALHNHYTQKSLSLSPGK | |
| 46 | APELLGGPSVFLFPPKPKDTLMISRTPEVTCVVVDVSHEDPEVKFN | Clone CH3C.35.21.5 |
| | WYVDGVEVHNAKTKPREEQYNSTYRVVSVLTVLHQDWLNGKEY | |
| | KCKVSNKALPAPIEKTISKAKGQPREPQVYTLPPSRDELTKNQVSLT | |
| | CLVKGFYPSDIAVLWESYGTEWSSYRTTPPVLDSDGSFFLYSKLTV | |
| | TREEWQQGFVFSCWVMHEALHNHYTQKSLSLSPGK | |
| 47 | APELLGGPSVFLFPPKPKDTLMISRTPEVTCVVVDVSHEDPEVKFN | Clone CH3C.35.21.6 |
| | WYVDGVEVHNAKTKPREEQYNSTYRVVSVLTVLHQDWLNGKEY | |
| | KCKVSNKALPAPIEKTISKAKGQPREPQVYTLPPSRDELTKNQVSLT | |
| | CLVKGFYPSDIAVLWESYGTEWSSYRTTPPVLDSDGSFFLYSKLTV | |
| | TKEEWQQGFVFSCWVMHEALHNHYTQKSLSLSPGK | |
| 48 | APELLGGPSVFLFPPKPKDTLMISRTPEVTCVVVDVSHEDPEVKFN | Clone CH3C.35.21.7 |
| | WYVDGVEVHNAKTKPREEQYNSTYRVVSVLTVLHQDWLNGKEY | |
| | KCKVSNKALPAPIEKTISKAKGQPREPQVYTLPPSRDELTKNQVSLT | |
| | CLVKGFYPSDIAVLWESYGTEWSSYRTTPPVLDSDGSFFLYSKLTV | |
| | TREEWQQGFVFTCWVMHEALHNHYTQKSLSLSPGK | |
| 49 | APELLGGPSVFLFPPKPKDTLMISRTPEVTCVVVDVSHEDPEVKFN | Clone CH3C.35.21.8 |
| | WYVDGVEVHNAKTKPREEQYNSTYRVVSVLTVLHQDWLNGKEY | |
| | KCKVSNKALPAPIEKTISKAKGQPREPQVYTLPPSRDELTKNQVSLT | |
| | CLVKGFYPSDIAVLWESYGTEWSSYRTTPPVLDSDGSFFLYSKLTV | |
| | TREEWQQGFVFTCGVMHEALHNHYTQKSLSLSPGK | |
| 50 | APELLGGPSVFLFPPKPKDTLMISRTPEVTCVVVDVSHEDPEVKFN | Clone CH3C.35.21.9 |
| | WYVDGVEVHNAKTKPREEQYNSTYRVVSVLTVLHQDWLNGKEY | |
| | KCKVSNKALPAPIEKTISKAKGQPREPQVYTLPPSRDELTKNQVSLT | |
| | CLVKGFYPSDIAVLWESYGTEWSSYRTTPPVLDSDGSFFLYSKLTV | |
| | TREEWQQGFVFECWVMHEALHNHYTQKSLSLSPGK | |
| 51 | APELLGGPSVFLFPPKPKDTLMISRTPEVTCVVVDVSHEDPEVKFN | Clone CH3C.35.21.10 |
| | WYVDGVEVHNAKTKPREEQYNSTYRVVSVLTVLHQDWLNGKEY | |
| | KCKVSNKALPAPIEKTISKAKGQPREPQVYTLPPSRDELTKNQVSLT | |
| | CLVKGFYPSDIAVLWESYGTEWSSYRTTPPVLDSDGSFFLYSKLTV | |
| | TREEWQQGFVFKCWVMHEALHNHYTQKSLSLSPGK | |
| 52 | APELLGGPSVFLFPPKPKDTLMISRTPEVTCVVVDVSHEDPEVKFN | Clone CH3C.35.21.11 |
| | WYVDGVEVHNAKTKPREEQYNSTYRVVSVLTVLHQDWLNGKEY | |
| | KCKVSNKALPAPIEKTISKAKGQPREPQVYTLPPSRDELTKNQVSLT | |
| | CLVKGFYPSDIAVLWESYGTEWSSYRTTPPVLDSDGSFFLYSKLTV | |
| | TPEEWQQGFVFKCWVMHEALHNHYTQKSLSLSPGK | |
| 53 | APELLGGPSVFLFPPKDTLMISRTPEVTCVVVDVSHEDPEVKFN | Clone CH3C.35.21.12 |
| | WYVDGVEVHNAKTKPREEQYNSTYRVVSVLTVLHQDWLNGKEY | |
| | KCKVSNKALPAPIEKTISKAKGQPREPQVYTLPPSRDELTKNQVSLT | |
| | CLVKGFYPSDIAVWWESYGTEWSSYRTTPPVLDSDGSFFLYSKLTV | |
| | TREEWQQGFVFSCSVMHEALHNHYTQKSLSLSPGK | |
| 54 | APELLGGPSVFLFPPKPKDTLMISRTPEVTCVVVDVSHEDPEVKFN | Clone CH3C.35.21.13 |
| | WYVDGVEVHNAKTKPREEQYNSTYRVVSVLTVLHQDWLNGKEY | |
| | KCKVSNKALPAPIEKTISKAKGQPREPQVYTLPPSRDELTKNQVSLT | |
| | CLVKGFYPSDIAVWWESYGTEWSSYRTTPPVLDSDGSFFLYSKLTV | |
| | TGEEWQQGFVFSCSVMHEALHNHYTQKSLSLSPGK | |
| 55 | APELLGGPSVFLFPPKPKDTLMISRTPEVTCVVVDVSHEDPEVKFN | Clone CH3C.35.21.14 |
| | WYVDGVEVHNAKTKPREEQYNSTYRVVSVLTVLHQDWLNGKEY | |
| | KCKVSNKALPAPIEKTISKAKGQPREPQVYTLPPSRDELTKNQVSLT | |
| | CLVKGFYPSDIAVWWESYGTEWSSYRTTPPVLDSDGSFFLYSKLTV | |
| | TREEWQQGFVFTCWVMHEALHNHYTQKSLSLSPGK | |
| 56 | APELLGGPSVFLFPPKPKDTLMISRTPEVTCVVVDVSHEDPEVKFN | Clone CH3C.35.21.15 |
| | WYVDGVEVHNAKTKPREEQYNSTYRVVSVLTVLHQDWLNGKEY | |
| | KCKVSNKALPAPIEKTISKAKGQPREPQVYTLPPSRDELTKNQVSLT | |
| | CLVKGFYPSDIAVWWESYGTEWSSYRTTPPVLDSDGSFFLYSKLTV | |
| | TGEEWQQGFVFTCWVMHEALHNHYTQKSLSLSPGK | |
| 57 | APELLGGPSVFLFPPKPKDTLMISRTPEVTCVVVDVSHEDPEVKFN | Clone CH3C.35.21.16 |
| | WYVDGVEVHNAKTKPREEQYNSTYRVVSVLTVLHQDWLNGKEY | |
| | KCKVSNKALPAPIEKTISKAKGQPREPQVYTLPPSRDELTKNQVSLT | |
| | CLVKGFYPSDIAVWWESYGTEWSSYRTTPPVLDSDGSFFLYSKLTV | |
| | TREEWQQGFVFTCGVMHEALHNHYTQKSLSLSPGK | |
| 58 | APELLGGPSVFLFPPKPKDTLMISRTPEVTCVVVDVSHEDPEVKFN | Clone CH3C.35.21.17 |
| | WYVDGVEVHNAKTKPREEQYNSTYRVVSVLTVLHQDWLNGKEY | |
| | KCKVSNKALPAPIEKTISKAKGQPREPQVYTLPPSRDELTKNQVSLT | |
| | CLVKGFYPSDIAVLWESYGTEWSSYKTTPPVLDSDGSFFLYSKLTV | |
| | TKEEWQQGFVFSCSVMHEALHNHYTQKSLSLSPGK | |
| 59 | APELLGGPSVFLFPPKPKDTLMISRTPEVTCVVVDVSHEDPEVKFN | Clone CH3C.35.21.18 |
| | WYVDGVEVHNAKTKPREEQYNSTYRVVSVLTVLHQDWLNGKEY | |
| | KCKVSNKALPAPIEKTISKAKGQPREPQVYTLPPSRDELTKNQVSLT | |
| | CLVKGFYPSDIAVLWESYGTEWSSYRTTPPVLDSDGSFFLYSKLTV | |
| | TKEEWQQGFVFSCSVMHEALHNHYTQKSLSLSPGK | |
| 60 | APELLGGPSVFLFPPKPKDTLMISRTPEVTCVVVDVSHEDPEVKFN | Clone CH3C.35.20.1 |
| | WYVDGVEVHNAKTKPREEQYNSTYRVVSVLTVLHQDWLNGKEY | |
| | KCKVSNKALPAPIEKTISKAKGQPREPQVYTLPPSRDELTKNQVSLT | |
| | CLVKGFYPSDIAVEWESFGTEWSSYKTTPPVLDSDGSFFLYSKLTVT | |
| | KEEWQQGFVFSCSVMHEALHNHYTQKSLSLSPGK | |
| 61 | APELLGGPSVFLFPPKPKDTLMISRTPEVTCVVVDVSHEDPEVKFN | Clone CH3C.35.20.2 |
| | WYVDGVEVHNAKTKPREEQYNSTYRVVSVLTVLHQDWLNGKEY | |
| | KCKVSNKALPAPIEKTISKAKGQPREPQVYTLPPSRDELTKNQVSLT | |
| | CLVKGFYPSDIAVEWESYGTEWASYKTTPPVLDSDGSFFLYSKLTV | |
| | TKEEWQQGFVFSCSVMHEALHNHYTQKSLSLSPGK | |
| 62 | APELLGGPSVFLFPPKPKDTLMISRTPEVTCVVVDVSHEDPEVKFN | Clone CH3C.35.20.3 |
| | WYVDGVEVHNAKTKPREEQYNSTYRVVSVLTVLHQDWLNGKEY | |
| | KCKVSNKALPAPIEKTISKAKGQPREPQVYTLPPSRDELTKNQVSLT | |
| | CLVKGFYPSDIAVEWESYGTEWVSYKTTPPVLDSDGSFFLYSKLTV | |
| | TKEEWQQGFVFSCSVMHEALHNHYTQKSLSLSPGK | |
| 63 | APELLGGPSVFLFPPKPKDTLMISRTPEVTCVVVDVSHEDPEVKFN | Clone CH3C.35.20.4 |
| | WYVDGVEVHNAKTKPREEQYNSTYRVVSVLTVLHQDWLNGKEY | |
| | KCKVSNKALPAPIEKTISKAKGQPREPQVYTLPPSRDELTKNQVSLT | |
| | CLVKGFYPSDIAVEWESYGTEWSSYKTTPPVLDSDGSFFLYSKLTV | |
| | SKEEWQQGFVFSCSVMHEALHNHYTQKSLSLSPGK | |
| 64 | APELLGGPSVFLFPPKPKDTLMISRTPEVTCVVVDVSHEDPEVKFN | Clone CH3C.35.20.5 |
| | WYVDGVEVHNAKTKPREEQYNSTYRVVSVLTVLHQDWLNGKEY | |
| | KCKVSNKALPAPIEKTISKAKGQPREPQVYTLPPSRDELTKNQVSLT | |
| | CLVKGFYPSDIAVEWESFGTEWASYKTTPPVLDSDGSFFLYSKLTV | |
| | TKEEWQQGFVFSCSVMHEALHNHYTQKSLSLSPGK | |
| 65 | APELLGGPSVFLFPPKPKDTLMISRTPEVTCVVVDVSHEDPEVKFN | Clone CH3C.35.20.6 |
| | WYVDGVEVHNAKTKPREEQYNSTYRVVSVLTVLHQDWLNGKEY | |
| | KCKVSNKALPAPIEKTISKAKGQPREPQVYTLPPSRDELTKNQVSLT | |
| | CLVKGFYPSDIAVEWESFGTEWVSYKTTPPVLDSDGSFFLYSKLTV | |
| | TKEEWQQGFVFSCSVMHEALHNHYTQKSLSLSPGK | |
| 66 | APELLGGPSVFLFPPKPKDTLMISRTPEVTCVVVDVSHEDPEVKFN | Clone CH3C.35.21.a.1 |
| | WYVDGVEVHNAKTKPREEQYNSTYRVVSVLTVLHQDWLNGKEY | |
| | KCKVSNKALPAPIEKTISKAKGQPREPQVYTLPPSRDELTKNQVSLT | |
| | CLVKGFYPSDIAVWWESFGTEWSSYKTTPPVLDSDGSFFLYSKLTV | |
| | TKEEWQQGFVFSCSVMHEALHNHYTQKSLSLSPGK | |
| 67 | APELLGGPSVFLFPPKPKDTLMISRTPEVTCVVVDVSHEDPEVKFN | Clone CH3C.35.21.a.2 |
| | WYVDGVEVHNAKTKPREEQYNSTYRVVSVLTVLHQDWLNGKEY | |
| | KCKNSNKALPAPIEKTISKAKGQPREPQVYTLPPSRDELTKNQVSLT | |
| | CLVKGFYPSDIAVWWESYGTEWASYKTTPPVLDSDGSFFLYSKLTV | |
| | TKEEQQGFVFSCSVMHEALHNHYTQKSLSLSPGK | |
| 68 | APELLGGPSVFLFPPKPKDTLMISRTPEVTCVVVDVSHEDPEVKFN | Clone CH3C.35.21.a.3 |
| | WYVDGVEVHNAKTKPREEQYNSTYRVVSVLTVLHQDWLNGKEY | |
| | KCKVSNKALPAPIEKTISKAKGQPREPQVYTLPPSRDELTKNQVSLT | |
| | CLVKGFYPSDIAVWWESYGTEWVSYKTTPPVLDSDGSFFLYSKLTV | |
| | TKEEWQQGFVFSCSVMHEALHNHYTQKSLSLSPGK | |
| 69 | APELLGGPSVFLFPPKPKDTLMISRTPEVTCVVVDVSHEDPEVKFN | Clone CH3C.35.21.a.4 |
| | WYVDGVEVHNAKTKPREEQYNSTYRVVSVLTVLHQDWLNGKEY | |
| | KCKVSNKALPAPIEKTISKAKGQPREPQVYTLPPSRDELTKNQVSLT | |
| | CLVKGFYPSDIAVWWESYGTEWSSYKTTPPVLDSDGSFFLYSKLTV | |
| | SKEEWQQGFVFSCSVMHEALHNHYTQKSLSLSPGK | |
| 70 | APELLGGPSVFLFPPKPKDTLMISRTPEVTCVVVDVSHEDPEVKFN | Clone CH3C.35.21.a.5 |
| | WYVDGVEVHNAKTKPREEQYNSTYRVVSVLTVLHQDWLNGKEY | |
| | KCKVSNKALPAPIEKTISKAKGQPREPQVYTLPPSRDELTKNQVSLT | |
| | CLVKGFYPSDIAVWWESFGTEWASYKTTPPVLDSDGSFFLYSKLTV | |
| | TKEEWQQGFVFSCSVMHEALHNHYTQKSLSLSPGK | |
| 71 | APELLGGPSVFLFPPKPKDTLMISRTPEVTCVVVDVSHEDPEVKFN | Clone CH3C.35.21.a.6 |
| | WYVDGVEVHNAKTKPREEQYNSTYRVVSVLTVLHQDWLNGKEY | |
| | KCKVSNKALPAPIEKTISKAKGQPREPQVYTLPPSRDELTKNQVSLT | |
| | CLVKGFYPSDIAVWWESFGTEWVSYKTTPPVLDSDGSFFLYSKLTV | |
| | TKEEWQQGFVFSCSVMHEALHNHYTQKSLSLSPGK | |
| 72 | APELLGGPSVFLFPPKPKDTLMISRTPEVTCVVVDVSHEDPEVKFN | Clone CH3C.35.23.1 |
| | WYVDGVEVHNAKTKPREEQYNSTYRVVSVLTVLHQDWLNGKEY | |
| | KCKVSNKALPAPIEKTISKAKGQPREPQVYTLPPSRDELTKNQVSLT | |
| | CLVKGFYPSDIAVEWESFGTEWSNYKTTPPVLDSDGSFFLYSKLTV | |
| | TKEEWQQGFVFSCSVMHEALHNHYTQKSLSLSPGK | |
| 73 | APELLGGPSVFLFPPKPKDTLMISRTPEVTCVVVDVSHEDPEVKFN | Clone CH3C.35.23.2 |
| | WYVDGVEVHNAKTKPREEQYNSTYRVVSVLTVLHQDWLNGKEY | |
| | KCKVSNKALPAPIEKTISKAKGQPREPQVYTLPPSRDELTKNQVSLT | |
| | CLVKGFYPSDIAVEWESYGTEWANYKTTPPVLDSDGSFFLYSKLTV | |
| | TKEEWQQGFVFSCSVMHEALHNHYTQKSLSLSPGK | |
| 74 | APELLGGPSVFLFPPKPKDTLMISRTPEVTCVVVDVSHEDPEVKFN | Clone CH3C.35.23.3 |
| | WYVDGVEVHNAKTKPREEQYNSTYRVVSVLTVLHQDWLNGKEY | |
| | KCKVSNKALPAPIEKTISKAKGQPREPQVYTLPPSRDELTKNQVSLT | |
| | CLVKGFYPSDIAVEWESYGTEWVNYKTTPPVLDSDGSFFLYSKLTV | |
| | TKEEWQQGFVFSCSVMHEALHNHYTQKSLSLSPGK | |
| 75 | APELLGGPSVFLFPPKPKDTLMISRTPEVTCVVVDVSHEDPEVKFN | Clone CH3C.35.23.4 |
| | WYVDGVEVHNAKTKPREEQYNSTYRVVSVLTVLHQDWLNGKEY | |
| | KCKVSNKALPAPIEKTISKAKGQPREPQVYTLPPSRDELTKNQVSLT | |
| | CLVKGFYPSDIAVEWESYGTEWSNYKTTPPVLDSDGSFFLYSKLTV | |
| | SKEEWQQGFVFSCSVMHEALHNHYTQKSLSLSPGK | |
| 76 | APELLGGPSVFLFPPKPKDTLMISRTPEVTCVVVDVSHEDPEVKFN | Clone CH3C.35.23.5 |
| | WYVDGVEVHNAKTKPREEQYNSTYRVVSVLTVLHQDWLNGKEY | |
| | KCKVSNKALPAPIEKTISKAKGQPREPQVYTLPPSRDELTKNQVSLT | |
| | CLVKGFYPSDIAVEWESFGTEWANYKTTPPVLDSDGSFFLYSKLTV | |
| | TKEEWQQGFVFSCSVMHEALHNHYTQKSLSLSPGK | |
| 77 | APELLGGPSVFLFPPKPKDTLMISRTPEVTCVVVDVSHEDPEVKFN | Clone CH3C.35.23.6 |
| | WYVDGVEVHNAKTKPREEQYNSTYRVVSVLTVLHQDWLNGKEY | |
| | KCKVSNKALPAPIEKTISKAKGQPREPQVYTLPPSRDELTKNQVSLT | |
| | CLVKGFYPSDIAVEWESFGTEWVNYKTTPPVLDSDGSFFLYSKLTV | |
| | TKEEWQQGFVFSCSVMHEALHNHYTQKSLSLSPGK | |
| 78 | APELLGGPSVFLFPPKPKDTLMISRTPEVTCVVVDVSHEDPEVKFN | Clone CH3C.35.24.1 |
| | WYVDGVEVHNAKTKPREEQYNSTYRVVSVLTVLHQDWLNGKEY | |
| | KCKVSNKALPAPIEKTISKAKGQPREPQVYTLPPSRDELTKNQVSLT | |
| | CLVKGFYPSDIAVWWESFGTEWSNYKTTPPVLDSDGSFFLYSKLTV | |
| | TKEEWQQGFVFSCSVMHEALHNHYTQKSLSLSPGK | |
| 79 | APELLGGPSVFLFPPKPKDTLMISRTPEVTCVVVDVSHEDPEVKFN | Clone CH3C.35.24.2 |
| | WYVDGVEVHNAKTKPREEQYNSTYRVVSVLTVLHQDWLNGKEY | |
| | KCKVSNKALPAPIEKTISKAKGQPREPQVYTLPPSRDELTKNQVSLT | |
| | CLVKGFYPSDIAVWWESYGTEWANYKTTPPVLDSDGSFFLYSKLT | |
| | VTKEEWQQGFVFSCSVMHEALHNHYTQKSLSLSPGK | |
| 80 | APELLGGPSVFLFPPKPKDTLMISRTPEVTCVVVDVSHEDPEVKFN | Clone CH3C.35.24.3 |
| | WYVDGVEVHNAKTKPREEQYNSTYRVVSVLTVLHQDWLNGKEY | |
| | KCKVSNKALPAPIEKTISKAKGQPREPQVYTLPPSRDELTKNQVSLT | |
| | CLVKGFYPSDIAVWWESYGTEWVNYKTTPPVLDSDGSFFLYSKLT | |
| | VTKEEWQQGFVFSCSVMHEALHNHYTQKSLSLSPGK | |
| 81 | APELLGGPSVFLFPPKPKDTLMISRTPEVTCVVVDVSHEDPEVKFN | Clone CH3C.35.24.4 |
| | WYVDGVEVHNAKTKPREEQYNSTYRVVSVLTVLHQDWLNGKEY | |
| | KCKVSNKALPAPIEKTISKAKGQPREPQVYTLPPSRDELTKNQVSLT | |
| | CLVKGFYPSDIAVWWESYGTEWSNYKTTPPVLDSDGSFFLYSKLTV | |
| | SKEEWQQGFVFSCSVMHEALHNHYTQKSLSLSPGK | |
| 82 | APELLGGPSVFLFPPKPKDTLMISRTPEVTCVVVDVSHEDPEVKFN | Clone CH3C.35.24.5 |
| | WYVDGVEVHNAKTKPREEQYNSTYRVVSVLTVLHQDWLNGKEY | |
| | KCKVSNKALPAPIEKTISKAKGQPREPQVYTLPPSRDELTKNQVSLT | |
| | CLVKGFYPSDIAVWWESFGTEWANYKTTPPVLDSDGSFFLYSKLTV | |
| | TKEEWQQGFVFSCSVMHEALHNHYTQKSLSLSPGK | |
| 83 | APELLGGPSVFLFPPKPKDTLMISRTPEVTCVVVDVSHEDPEVKFN | Clone CH3C.35.24.6 |
| | WYVDGVEVHNAKTKPREEQYNSTYRVVSVLTVLHQDWLNGKEY | |
| | KCKVSNKALPAPIEKTISKAKGQPREPQVYTLPPSRDELTKNQVSLT | |
| | CLVKGFYPSDIAVWWESFGTEWVNYKTTPPVLDSDGSFFLYSKLTV | |
| | TKEEWQQGFVFSCSVMHEALHNHYTQKSLSLSPGK | |
| 84 | APELLGGPSVFLFPPKPKDTLMISRTPEVTCVVVDVSHEDPEVKFN | Clone CH3C.35.21.17.1 |
| | WYVDGVEVHANKTKPREEQYNSTYRVVSVLTVLHQDWLNGKEY | |
| | KCKVSNKALPAPIEKTISKAKGQPREPQVYTLPPSRDELTKNQVSLT | |
| | CLVKGFYPSDIAVLWESFGTEWSSYKTTPPVLDSDGSFFLYSKLTVT | |
| | KEEWQQGFVFSCSVMHEALHNHYTQKSLSLSPGK | |
| 85 | APELLGGPSVFLFPPKPKDTLMISRTPEVTCVVVDVSHEDPEVKFN | Clone CH3C.35.21.17.2 |
| | WYVDGVEVHNAKTKPREEQYNSTYRVVSVLTVLHQDWLNGKEY | |
| | KCKVSNKALPAPIEKTISKAKGQPREPQVYTLPPSRDELTKNQVSLT | |
| | CLVKGFYPSDIAVLWESYGTEWASYKTTPPVLDSDGSFFLYSKLTV | |
| | TKEEWQQGFVFSCSVMHEALHNHYTQKSLSLSPGK | |
| 86 | APELLGGPSVFLFPPKPKDTLMISRTPEVTCVVVDVSHEDPEVKFN | Clone CH3C.35.21.17.3 |
| | WYVDGVEVHNAKTKPREEQYNSTYRVVSVLTVLHQDWLNGKEY | |
| | KCKVSNKALPAPIEKTISKAKGQPREPQVYTLPPSRDELTKNQVSLT | |
| | CLVKGFYPSDIAVLWESYGTEWVSYKTTPPVLDSDGSFFLYSKLTV | |
| | TKEEWQQGFVFSCSVMHEALHNHYTQKSLSLSPGK | |
| 87 | APELLGGPSVFLFPPKPKDTLMISRTPEVTCVVVDVSHEDPEVKFN | Clone CH3C.35.21.17.4 |
| | WYVDGVEVHNAKTKPREEQYNSTYRVVSVLTVLHQDWLNGKEY | |
| | KCKVSNKALPAPIEKTISKAKGQPREPQVYTLPPSRDELTKNQVSLT | |
| | CLVKGFYPSDIAVLWESYGTEWSSYKTTPPVLDSDGSFFLYSKLTV | |
| | SKEEWQQGFVFSCSVMHEALHNHYTQKSLSLSPGK | |
| 88 | APELLGGPSVFLFPPKPKDTLMISRTPEVTCVVVDVSHEDPEVKFN | Clone CH3C.35.21.17.5 |
| | WYVDGVEVHNAKTKPREEQYNSTYRVVSVLTVLHQDWLNGKEY | |
| | KCKVSNKALPAPIEKTISKAKGQPREPQVYTLPPSRDELTKNQVSLT | |
| | CLVKGFYPSDIAVLWESFGTEWASYKTTPPVLDSDGSFFLYSKLTV | |
| | TKEEWQQGFVFSCSVMHEALHNHYTQKSLSLSPGK | |
| 89 | APELLGGPSVFLFPPKPKDTLMISRTPEVTCVVVDVSHEDPEVKFN | Clone CH3C.35.21.17.6 |
| | WYVDGVEVHNAKTKPREEQYNSTYRVVSVLTVLHQDWLNGKEY | |
| | KCKVSNKALPAPIEKTISKAKGQPREPQVYTLPPSRDELTKNQVSLT | |
| | CLVKGFYPSDIAVLWESFGTEWVSYKTTPPVLDSDGSFFLYSKLTV | |
| | TKEEWQQGFVFSCSVMHEALHNHYTQKSLSLSPGK | |
| 90 | APELLGGPSVFLFPPKPKDTLMISRTPEVTCVVVDVSHEDPEVKFN | Clone CH3C.35.N390 |
| | WYVDGVEVHNAKTKPREEQYNSTYRVVSVLTVLHQDWLNGKEY | |
| | KCKVSNKALPAPIEKTISKAKGQPREPQVYTLPPSRDELTKNQVSLT | |
| | CLVKGFYPSDIAVEWESYGTEWSNYKTTPPVLDSDGSFFLYSKLTV | |
| | TKSEWQQGFVFSCSVMHEALHNHYTQKSLSLSPGK | |
| 91 | EPKSCDKTHTCPPCP | Human IgG1 hinge |
| | | amino acid sequence |
| 92 | MMDQARSAFSNLFGGEPLSYTRFSLARQVDGDNSHVEMKLAVDEE | Human transerrin |
| | ENADNNTKANVTKPKRCSGSICYGTIAVIVFFLIGFMIGYLGYCKGV | receptor protein 1 |
| | EPKTECERLAGTESPVREEPGEDFPAARRLYWDDLKRKLSEKLDST | (TFR1) |
| | DFTGTIKLLNENSYVPREAGSQKDENLALYVENQFREFKLSKVWR | |
| | DQHFVKIQVKDSAQNSVIIVDKNGRLVYLVENPGGYVAYSKAATV | |
| | TGKLVHANFGTKKDFEDLYTPVNGSIVIVRAGKITFAEKVANAESL | |
| | NAIGVLIYMDQTKFPIVNAELSFFGHAHLGTGDPYTPGFPSFNHTQF | |
| | PPSRSSGLPNIPVQTISRAAAEKLFGNMEGDCPSDWKTDSTCRMVT | |
| | SESKNVKLTVSNVLKEIKILNIFGVIKGFVEPDHYVVVGAQRDAWG | |
| | PGAAKSGVGTALLLKLAQMFSDMVLKDGFQPSRSIIFASWSAGDFG | |
| | SVGATEWLEGYLSSLHLKAFTYINLDKAVLGTSNFKVSASPLLTYLI | |
| | EKTMQNVKHPVTGQFLYQDSNWASKVELKTLDNAAFPFLAYSGIP | |
| | AVSFCFCEDTDYPYLGTTMDTYKELIERIPELNKVARAAAEVAGQF | |
| | VIKLTHDVELNLDYERYNSQLLSFVRDLNQYRADIKEMGLSLQWL | |
| | YSARGDFFRATSRLTTDFGNAEKTDRFVMKKLNDRVMRVEYHFLS | |
| | PYVSPKESPFRHVFWGSGSHTLPALLENLKLRKQNNGAFNETLFRN | |
| | QLALATWTIQGAANALSGDVWDIDNEF | |
| 93 | APELLGGPSVFLFPPKPKDTLMISRTPEVTCVVVDVSHEDPEVKFN | Clone CH3C.35.21 with |
| | WYVDGVEVHNAKTKPREEQYNSTYRVVSVLTVLHQDWLNGKEY | knob mutation |
| | KCKVSNKALPAPIEKTISKAKGQPREPQVYTLPPSRDELTKNQVSL | |
| | WCLVKGFYPSDIAVWWESYGTEWSSYKTTPPVLDSDGSFFLYSKL | |
| | TVTKEEWQQGFVFSCSVMHEALHNHYTQKSLSLSPGK | |
| 94 | APEAAGGPSVFLFPPKPKDTLMISRTPEVTCVVVSHEDPEVKFN | Clone CH3C.35.21 with |
| | WYVDGVEVHNAKTKPREEQYNSTYRVVSVLTVLHQDWLNGKEY | knob and LALA |
| | KCKVSNKALPAPIEKTISKAKGQPREPQVYTLPPSRDELTKNQVSL | mutations |
| | WCLVKGFYPSDIAVWWESYGTEWSSYKTTPPVLDSDGSFFLYSKL | |
| | TVTKEEWQQGFVFSCSVMHEALHNHYTQKSLSLSPGK | |
| 95 | APELLGGPSVFLFPPKPKDTLYITREPEVTCVVVDVSHEDPEVKFNW | Clone CH3C.35.21 with |
| | YVDGVEVHNAKTKPREEQYNSTYRVVSVLTVLHQDWLNGKEYKC | knob and YTE mutations |
| | KVSNKALPAPIEKTISKAKGQPREPQVYTLPPSRDELTKNQVSLWCL | |
| | VKGFYPSDIAVWWESYGTEWSSYKTTPPVLDSDGSFFLYSKLTVTK | |
| | EEWQQGFVFSCSVMHEALHNHYTQKSLSLSPGK | |
| 96 | APEAAGGPSVFLFPPKPKDTLYITREPEVTCVVVDVSHEDPEVKFN | Clone CH3C.35.21 with |
| | WYVDGVEVHNAKTKPREEQYNSTYRVVSVLTVLHQDWLNKEY | knob, LALA, and YTE |
| | KCKVSNKALPAPIEKTISKAKGQPREPQVYTLPPSRDELTKNQVSL | mutations |
| | WCLVKGFYPSDIAVWWESYGTEWSSYKTTPPVLDSDGSFFLYSKL | |
| | TVTKEEWQQGFVFSCSVMHEALHNHYTQKSLSLSPGK | |
| 97 | APELLGGPSVFLFPPKPKDTLMISRTPEVTCVVVDVSHEDPEVKFN | Fc sequence with hole |
| | WYVDGVEVHNAKTKPREEQYNSTYRVVSVLTVLHQDWLNGKEY | mutations |
| | KCKVSNKALPAPIEKTISKAKGQPREPQVYTLPPSRDELTKNQVSLS | |
| | CAVKGFYPSDIAVEWESNGQPENNYKTTPPVLDSDGSFFLVSKLTV | |
| | DKSRWQQGNVFSCSVMHEALHNHYTQKSLSLSPGK | |
| 98 | APEAAGGPSVFLFPPKPKDTLMISRTPEVTCVVVDVSHEDPEVKFN | Fc sequence with hole |
| | WYVDGVEVHNAKTKPREEQYNSTYRVVSVLTVLHQDWLNGKEY | and LALA mutations |
| | KCKVSNKALPAPIEKTISKAKGQPREPQVYTLPPSRDELTKNQVSLS | |
| | CAVKGFYPSDIAVEWESNGQPENNYKTTPPVLDSDGSFFLVSKLTV | |
| | DKSRWQQGNVFSCSVMHEALHNHYTQKSLSLSPGK | |
| 99 | APELLGGPSVFLFPPKPKDTLYITREPEVTCVVVDVSHEDPEVKFNW | Fc sequence with hole |
| | YVDGVEVHNAKTKPREEQYNSTYRVVSVLTVLHQDWLNGKEYKC | and YTE mutations |
| | KVSNKALPAPIEKTISKAKGQPREPQVYTLPPSRDELTKNQVSLSCA | |
| | VKGFYPSDIAVEWESNGQPENNYKTTPPVLDSDGSFFLVSKLTVDK | |
| | SRWQQGNVFSCSVMHEALHNHYTQKSLSLSPGK | |
| 100 | APEAAGGPSVFLFPPKPKDTLYITREPEVTCVVVDVSHEDPEVKFN | Fc sequence with hole, |
| | WYVDGVEVHNAKTKPREEQYNSTYRVVSVLTVLHQDWLNGKEY | LALA, and YTE |
| | KCKVSNKALPAPIEKTISKAKGQPREPQVYTLPPSRDELTKNQVSLS | mutations |
| | CAVKGFYPSDIAVEWESNGQPENNYKTTPPVLDSDGSFFLVSKLTV | |
| | DKSRWQQGNVFSCSVMHEALHNHYTQKSLSLSPGK | |
| 101 | APELLGGPSVFLFPPKPKDTLMISRTPEVTCVVVDVSHEDPEVKFN | Clone CH3C.35.21 with |
| | WYVDGVEVHNAKTKPREEQYNSTYRVVSVLTVLHQDWLNGKEY | hole mutations |
| | KCKVSNKALPAPIEKTISKAKGQPREPQVYTLPPSRDELTKNQVSLS | |
| | CAVKGFYPSDIAVWWESYGTEWSSYKTTPPVLDSDGSFFLVSKLTV | |
| | TKEEWQQGFVFSCSVMHEALHNHYTQKSLSLSPGK | |
| 102 | APEAAGGPSVFLFPPKPKDTLMISRTPEVTCVVVDVSHEDPEVKFN | Clone CH3C.35.21 with |
| | WYVDGVEVHNAKTKPREEQYNSTYRVVSVLTVLHQDWLNGKEY | hole and LALA |
| | KCKVSNKALPAPIEKTISKAKGQPREPQVYTLPPSRDELTKNQVSLS | mutations |
| | CAVKGFYPSDIAVWWESYGTEWSSYKTTPPVLDSDGSFFLVSKLTV | |
| | TKEEWQQGFVFSCSVMHEALHNHYTQKSLSLSPGK | |
| 103 | APELLGGPSVFLFPPKPKDTLYITREPEVTCVVVDVSHEDPEVKFNW | Clone CH3C.35.21 with |
| | YVDGVEVHNAKTKPREEQYNSTYRVVSVLTVLHQDWLNGKEYKC | hole and YTE mutations |
| | KVSNKALPAPIEKTISKAKGQPREPVYTLPPSRDELTKNQVSLSCA | |
| | VKGFYPSDIAVWWESYGTEWSSYKTTPPVLDSDGSFFLVSKLTVTK | |
| | EEWQQGFVFSCSVMHEALHNHYTQKSLSLSPGK | |
| 104 | APEAAGGPSVFLFPPKPKDTLYITREPEVTCVVVDVSHEDPEVKFN | Clone CH3C.35.21 with |
| | WYVDGVEVHNAKTKPREEQYNSTYRVVSVLTVLHQDWLNGKEY | hole, LALA, and YTE |
| | KCKVSNKALPAPIEKTISKAKGQPREPQVYTLPPSRDELTKNQVSLS | mutations |
| | CAVKGFYPSDIAVWWESYGTEWSSYKTTPPVLDSDGSFFLVSKLTV | |
| | TKEEWQQGFVFSCSVMHEALHNHYTQKSLSLSPGK | |
| 105 | APELLGGPSVFLFPPKPKDTLMISRTPEVTCVVVDVSHEDPEVKFN | Fc sequence with knob |
| | WYVDGVEVHNAKTKPREEQYNSTYRVVSVLTVLHQDWLNGKEY | mutation |
| | KCKVSNKALPAPIEKTISKAKGQPREPQVYTLPPSRDELTKNQVSL | |
| | WCLVKGFYPSDIAVEWESNGQPENNYKTTPPVLDSDGSFFLYSKLT | |
| | VDKSRWQQGNVFSCSVMHEALHNHYTQKSLSLSPGK | |
| 106 | APEAAGGPSVFLFPPKPKDTLMISRTPEVTCVVVDVSHEDPEVKFN | Fc sequence with knob |
| | WYVDGVEVHNAKTKPREEQYNSTYRVVSVLTVLHQDWLNGKEY | and LALA mutations |
| | KCKVSNKALPAPIEKTISKAKGQPREPQVYTLPPSRDELTKNQVSL | |
| | WCLVKGFYPSDIAVEWESNGQPENNYKTTPPVLDSDGSFFLYSKLT | |
| | VDKSRWQQGNVFSCSVMHEALHNHYTQKSLSLSPGK | |
| 107 | APELLGGPSVFLFPPKPKDTLYITREPEVTCVVVDVSHEDPEVKFNW | Fc sequence with knob |
| | YVDGVEVHNAKTKPREEQYNSTYRVVSVLTVLHQDWLNGKEYKC | and YTE mutations |
| | KVSNKALPAPIEKTISKAKGQPREPQVYTLPPSRDELTKNQVSLWCL | |
| | VKGFYPSDIAVEWESNGPENNYKTTPPVLDSDGSFFLYSKLTVDK | |
| | SRWQQGNVFSCSVMHEALHNHYTQKSLSLSPGK | |
| 108 | APEAAGGPSVFLFPPKPKDTLYITREPEVTCVVVDVSHEDPEVKFN | Fc sequence with knob, |
| | WYVDGVEVHNAKTKPREEQYNSTYRVVSVLTVLHQDSLNGKEY | LALA, and YTE |
| | KCKVSNKALPAPIEKTISKAKGQPREPQVYTLPPSRDELTKNQVSL | mutations |
| | WCLVKGFYPSDIAVEWESNGQPENNYKTTPPVLDSDGSFFLYSKLT | |
| | VDKSRWQQGNVFSCSVMHEALHNHYTQKSLSLSPGK | |
| 109 | DKTHTCPPCP | Portion of human IgG1 |
| | | hinge sequence (Partial |
| | | hinge) |
| 110 | DKTHTCPPCPAPEAAGGPSVFLFPPKPKDTLMISRTPEVTCVVVDVS | Clone CH3C.35.21 with |
| | HEDPEVKFNWYVDGVEVHNAKTKPREEQYNSTYRVVSVLTVLHQ | knob and LALA |
| | DWLNGKEYKCKVSNKALPAPIEKTISKAKGQPREPQVYTLPPSRDE | mutations and portion of |
| | LTKNQVSLWCLVKGFYPSDIAVWWESYGTEWSSYKTTPPVLDSDG | human IgG1 hinge |
| | SFFLYSKLTVTKEEWQQGFVFSCSVMHEALHNHYTQKSLSLSPGK | sequence |
| 111 | APELLGGPSVFLFPPKPKDTLMISRTPEVTCVVVDVSHEDPEVKFN | Clone CH3B.1 |
| | WYVDGVEVHNAKTKPREEQYNSTYRVVSVLTVLHQDWLNGKEY | |
| | KCKVSNKALPAPIEKTISKAKGQPRFDYVTTLPPSRDELTKNQVSLT | |
| | CLVKGFYPSDIAVEWESNGQPENNYKTTPPVLDSDGSFFLYSKLTV | |
| | DKSRWQQGNVFSCSVMHEALHNHYGFHDLSLSPGK | |
| 112 | APELLGGPSVFLFPPKPKDTLMISRTPEVTCVVVDVSHEDPEVKFN | Clone CH3B.2 |
| | WYVDGVEVHNAKTKPREEQYNSTYRVVSVLTVLHQDWLNGKEY | |
| | KCKVSNKALPAPIEKTISKAKGQPRFDMVTTLPPSRDELTKNQVSLT | |
| | CLVKGFYPSDIAVEWESNGQPENNYKTTPPVLDSDGSFFLYSKLTV | |
| | DKSRWQQGNVFSCSVMHEALHNHYGFHDSLSLPGK | |
| 113 | APELLGGPSVFLFPPKPKDTLMISRTPEVTCVVVDVSHEDPEVKFN | Clone CH3B.3 |
| | WYVDGVEVHNAKTKPREEQYNSTYRVVSVLTVLHQDWLNGKEY | |
| | KCKVSNKALPAPIEKTISKAKGQPRFEYVTTLPPSRDELTKNQVSLT | |
| | CLVKGFYPSDIAVEWESNGQPENNYKTTPPVLDSDGSFFLYSKLTV | |
| | DKSRWQQGNVFSCSVMHEALHNHYGFHDLSLSPGK | |
| 114 | APELLGGPSVFLFPPKPKDTLMISRTPEVTCVVVDVSHEDPEVKFN | Clone CH3B.4 |
| | WYVDGVEVHNAKTKPREEQYNSTYRVVSVLTVLHQDWLNGKEY | |
| | KCKVSNKALPAPIEKTISKAKGQPRFEMVTTLPPSRDELTKNQVSLT | |
| | CLVKGFYPSDIAVEWESNGQPENNYKTTPPVLDSDGSFFLYSKLTV | |
| | DKSRWQQGNVFSCSVMHEALHNHYGFHDLSLSPGK | |
| 115 | APELLGGPSVFLFPPKPKDTLMISRTPEVTCVVVDVSHEDPEVKFN | Clone CH3B.5 |
| | WYVDGVEVHNAKTKPREEQYNSTYRVVSVLTVLHQDWLNGKEY | |
| | KCKVSNKALPAPIEKTISKAKGQPRFELVTTLPPSRDELTKNQVSLT | |
| | CLVKGFYPSDIAVEWESNGQPENNYKTTPPVLDSDGSFFLYSKLTV | |
| | DKSRWQQGNVFSCSVMHEALHNHYGFHDLSLSPGK | |
| 116 | APELLGGPSVFLFPPKPKDTLMISRTPEVTCVVVDVSHEDPEVEFIW | Clone CH2A2.1 |
| | YVDGVDVRYEWQLPREEQYNSTYRVVSVLTVLHQDWLNGKEYK | |
| | CKVSNKALPAPIEKTISKAKGQPREPQVYTLPPSRDELTKNQVSLTC | |
| | LVKGFYPSDIAVEWESNGQPENNYKTTPPVLDSDGSFFLYSKLTVD | |
| | KSRWQQGNVFSCSVMHEALHNHYTQKSLSLSPGK | |
| 117 | APELLGGPSVFLFPPKPKDTLMISRTPEVTCVVVDVSHEDPEVGFV | Clone CH2A2.2 |
| | WYVDGVPVSWEWYWPREEQYNSTYRVVSVLTVLHQDWLNGKEY | |
| | KCKVSNKALPAPIEKTISKAKGQPREPQVYTLPPSRDELTKNQVSLT | |
| | CLVKGFYPSDIAVEWESNGQPENNYKTTPPVLDSDGSFFLYSKLTV | |
| | DKSRWQQGNVFSCSVMHEALHNHTYQKSLSLSPGK | |
| 118 | APELLGGPSVFLFPPKPKDTLMISRTPEVTCVVVDVSHEDPEVQFD | Clone CH2A2.3 |
| | WYVDGVMVRREWHRPREEQYNSTYRVVSVLTVLHQDWLNGKEY | |
| | KCKVSNKALPAPIEKTISKAKGQPREPQVYTLPPSRDELTKNQVSLT | |
| | CLVKGFYPSDIAVEWESNGQPENNYKTTPPVLDSDGSFFLYSKLTV | |
| | DKSRWQQGNVFSCSVMHEALHNHYTQKSLSLSPGK | |
| 119 | APELLGGPSVFLFPPKPKDTLMISRTPEVTCVVVDVSHEDPEVSFEW | Clone CH2A2.4 |
| | YVDGVPVRWEWQWPREEQYNSTYRVVSVLTVLHQDWLNGKEYK | |
| | CKVSNKALPAPIEKTISKAKGQPREPQVYTLPPSRDELTKNQVSLTC | |
| | LVKGFYPSDIAVEWESNGQPENNYKTTPPVLDSDGSFFLYSKLTVD | |
| | KSRWQQGNVFSCSVMHEALHNHYTQKSLSLSPGK | |
| 120 | APELLGGPSVFLFPPKPKDTLMISRTPEVTCVVVDVSHEDPEVAFTW | Clone CH2A2.5 |
| | YVDGVPVRWEWQNPREEQYNSTYRVVSVLTVLHQDWLNGKEYK | |
| | CKVSNKALPAPIEKTISKAKGQPREPQVYTLPPSRDELTKNQVSLTC | |
| | LVKGFYPSDIAVEWESNGQPENNYKTTPPVLDSDGSFFLYSKLTVD | |
| | KSRWQQGNVFSCSVMHEALHNHYTQKSLSLSPGK | |
| 121 | APELLGGPSVFLFPPKPKDTLMISRTPEVTCVVVDPQTPPWEVKFN | Clone CH2C.1 |
| | WYVDGVEVHNAKTKPREEEYYTYYRVVSVLTVLHQDWLNGKEY | |
| | KCKVSNKALPAPIEKTISKAKGQPREPQVYTLPPSRDELTKNQVSLT | |
| | CLVKGFYPSDIAVEWESNGQPENNYKTTPPVLDSDGSFFLYSKLTV | |
| | DKSRWQQGNVFSCSVMHEALHNHYTQKSLSLSPGK | |
| 122 | APELLGGPSVFLFPPKPKDTLMISRTPEVTCVVVDPPSPPWEVKFNW | Clone CH2C.2 |
| | YVDGVEVHNAKTKPREEEYYSNYRVVSVLTVLHQDWLNGKEYKC | |
| | KVSNKALPAPIEKTISKAKGQPREPQVYTLPPSRDELTKNQVSLTCL | |
| | VKGFYPSDIAVEWESNGQPENNYKTTPPVLDSDGSFFLYSKLTVDK | |
| | SRWQQGNVFSCSVMHEALHNHYTQKSLSLSPGK | |
| 123 | APELLGGPSVFLFPPKPKDTLMISRTPEVTCVVVDPQTPPWEVKFN | Clone CH2C.3 |
| | WYVDGVEVHNAKTKPREEEYYSNYRVVSVLTVLHQDWLNGKEY | |
| | KCKVSNKALPAPIEKTISKAKGQPREPQVYTLPPSRDELTKNQVSLT | |
| | CLVKGFYPSDIAVEWESNGQPENNYKTTPPVLDSDGSFFLYSKLTV | |
| | DKSRWQQGNVFSCSVMHEALHNHYTQKSLSLSPGK | |
| 124 | APELLGGPSVFLFPPKPKDTLMISRTPEVTCVVVDFRGPPWEVKFN | Clone CH2C.4 |
| | WYVDGVEVHNAKTKPREEEYYHDYRVVSVLTVLHQDWLNGKEY | |
| | KCKVSNKALPAPIEKTISKAKGQPREPQVYTLPPSRDELTKNQVSLT | |
| | CLVKGFYPSDIAVEWESNGQPENNYKTTPPVLDSDGSFFLYSKLTV | |
| | DKSRWQQGNVFSCSVMHEALHNHYTQKSLSLSPGK | |
| 125 | APELLGGPSVFLFPPKPKDTLMISRTPEVTCVVVDPQTVPWEVKFN | Clone CH2C.5 |
| | WYVDGVEVHNAKTKPREEEYYSNYRVVSVLTVLHQDWLNGKEY | |
| | KCKVSNKALPAPIEKTISKAKGQPREPQVYTLPPSRDELTKNQVSLT | |
| | CLVKGFYPSDIAVEWESNGQPENNYKTTPPVLDSDGSFFLYSKLTV | |
| | DKSRWQQGNVFSCSVMHEALHNHYTQKSLSLSPGK | |
| 126 | APELLGGPSVFLFPPKPKDTLMISRTPEVTCVVVDVSVPPRMVKFN | Clone CH2D.1 |
| | WYVDGVEVHNAKTKSLTSQHNSTVRVVSVLTVLHQDWLNGKEY | |
| | KCKVSNKALPAPIEKTISKAKGQPREPQVYTLPPSRDELTKNQVSLT | |
| | CLVKGFYPSDIAVEWESNGQPENNYKTTPPVLDSDGSFFLYSKLTV | |
| | DKSRWQQGNVFSCSVMHEALHNHYTQKSLSLSPGK | |
| 127 | APELLGGPSVFLFPPKPKDTLMISRTPEVTCVVVDVSVPPWMVKFN | Clone CH2D.2 |
| | WYVDGVEVHNAKTKSLTSQHNSTVRVVSVLTVLHQDWLNGKEY | |
| | KCKVSNKALPAPIEKTISKAKGQPREPQVYTLPPSRDELTKNQVSLT | |
| | CLVKGFYPSDIAVEWESNGQPENNYKTTPPVLDSDGSFFLYSKLTV | |
| | DKSRWQQGNVFSCSVMHEALHNHYTQKSLSLSPGK | |
| 128 | APELLGGPSVFLFPPKPKDTLMISRTPEVTCVVVDVSDMWEYVKFN | Clone CH2D.3 |
| | WYVDGVEVHNAKTKPWVKQLNSTWRVVSVLTVLHQDWLNGKE | |
| | YKCKVSNKALPAPIEKTISKAKGQPREPQVYTLPPSRDELTKNQVSL | |
| | TCLVKGFYPSDIAVEWESNGQPENNYKTTPPVLDSDGSFFLYSKLT | |
| | VDKSRWQQGNVFSCSVMHEALHNHYTQKSLSLSPGK | |
| 129 | APELLGGPSVFLFPPKPKDTLMISRTPEVTCVVVDVSDDWTWVKFN | Clone CH2D.4 |
| | WYVDGVEVHNAKTKPWIAQPNSTWRVVSVLTVLHQDWLNGKEY | |
| | KCKVSNKALPAPIEKTISKAKGQPREPQVYTLPPSRDELTKNQVSLT | |
| | CLVKGFYPSDIAVEWESNGQPENNYKTTPPVLDSDGSFFLYSKLTV | |
| | DKSRWQQGNVFSCSVMHEALHNHYTQKSLSLSPGK | |
| 130 | APELLGGPSVFLFPPKPKDTLMISRTPEVTCVVVDVSDDWEWVKFN | Clone CH2D.5 |
| | WYVDGVEVHNAKTKPWKLQLNSTWRVVSVLTVLHQDWLNGKEY | |
| | KCKVSNKALPAPIEKTISKAKGQPREPQVYTLPPSRDELTKNQVSLT | |
| | CLVKGFYPSDIAVEWESNGQPENNYKTTPPVLDSDGSFFLYSKLTV | |
| | DKSRWQQGNVFSCSVMHEALHNHYTQKSLSLSPGK | |
| 131 | APELLGGPSVFLFPPKPKDTLMISRTPEVTCVVVDVSHEDPWVWFY | Clone CH2E3.1 |
| | WYVDGVEVHNAKTKPREEQYNSTYRVVSVLTVLHQDWLNGKEY | |
| | KCSVVNIALWWSIEKTISKAKGQPREPQVYTLPPSRDELTKNQVSLT | |
| | CLVKGFYPSDIAVEWESNGQPENNYKTTPPVLDSDGSFFLYSKLTV | |
| | DKSRWQQGNVFSCSVMHEALHNHYTQKSLSLSPGK | |
| 132 | APELLGGPSVFLFPPKPKDTLMISRTPEVTCVVVDVSHEDPVVGFR | Clone CH2E3.2 |
| | WYVDGVEVHNAKTKPREEQYNSTYRVVSVLTVLHQDWLNGKEY | |
| | KCRVSNSALTWKIEKTISKAKGQPREPQVYTLPPSRDELTKNQVSLT | |
| | CLVKGFYPSDIAVEWESNGQPENNYKTTPPVLDSDGSFFLYSKLTV | |
| | DKSRWQQGNVFSCSVMHEALHNHYTQKSLSLSPGK | |
| 133 | APELLGGPSVFLFPPKPKDTLMISRTPEVTCVVVDVSHEDPVVGFR | Clone CH2E3.3 |
| | WYVDGVEVHNAKTKPREEQYNSTYRVVSVLTVLHQDWLNGKEY | |
| | KCRVSNSALSWRIEKTISKAKGQPREPQVYTLPPSRDELTKNQVSLT | |
| | CLVKGFYPSDIAVEWESNGQPENNYKTTPPVLDSDGSFFLYSKLTV | |
| | DKSRWQQGNVFSCSVMHEALHNHYTQKSLSLSPGK | |
| 134 | APELLGGPSVFLFPPKPKDTLMISRTPEVTCVVVDVSHEDPIVGFRW | Clone CH2E3.4 |
| | YVDGVEVHNAKTKPREEQYNSTYRVVSVLTVLHQDWLNGKEYKC | |
| | RVSNSALRWRIEKTISKAKGQPREPQVYTLPPSRDELTKNQVSLTCL | |
| | VKGFYPSDIAVEWESNGQPENNYKTTPPVLDSDGSFFLYSKLTVDK | |
| | SRWQQGNVFSCSVMHEALHNHYTQKSLSLSPGK | |
| 135 | APELLGGPSVFLFPPKPKDTLMISRTPEVTCVVVDVSHEDPAVGFE | Clone CH2E3.5 |
| | WYVDGVEVHNAKTKPREEQYNSTYRVVSVLTVLHQDWLNGKEY | |
| | KCQVFNWALDWVIEKTISKAKGQPREPQVYTLPPSRDELTKNQVSL | |
| | TCLVKGFYPSDIAVEWESNGQPENNYKTTPPVLDSDGSFFLYSKLT | |
| | VDKSRWQQGNVFSCSVMHEALHNHYTQKSLSLSPGK | |
| 136 | APEAAGGPSVFLFPPKPKDTLMISRTPEVTCVVVDVSHEDPEVKFN | Clone CH3C.35.21.17 |
| | WYVDGVEVHNAKTKPREEQYNSTYRVVSVLTVLHQDWLNGKEY | with knob and LALA |
| | KCKVSNKALPAPIEKTISKAKGQPREPQVYTLPPSRDELTKNQVSL | mutations |
| | WCLVKGFYPSDIAVLWESYGTEWSSYKTTPPVLDSDGSFFLYSKLT | |
| | VTKEEWQQGFVFSCSVMHEALHNHYTQKSLSLSPGK | |
| 137 | APELLGGPSVFLFPPKPKDTLMISRTPEVTCVVVDVSHEDPEVKFN | Clone CH3C.35.20.1 |
| | WYVDGVEVHNAKTKPREEQYNSTYRVVSVLTVLHQDWLNGKEY | with knob mutation |
| | KCKVSNKALPAPIEKTISKAKGQPREPQVYTLPPSRDELTKNQVSL | |
| | WCLVKGFYPSDIAVEWESFGTEWSSYKTTPPVLDSDGSFFLYSKLT | |
| | VTKEEWQQGFVFSCSVMHEALHNHYTQKSLSLSPGK | |
| 138 | APEAAGGPSVFLFPPKPKDTLMISRTPEVTCVVVDVSHEDPEVKFN | Clone CH3C.35.20.1 |
| | WYVDGVEVHNAKTKPREEQYNSTYRVVSVLTVLHQDWLNGKEY | with knob and LALA |
| | KCKVSNKALPAPIEKTISKAKGQPREPQVYTLPPSRDELTKNQVSL | mutations |
| | WCLVKGFYPSDIAVEWESFGTEWSSYKTTPPVLDSDGSFFLYSKLT | |
| | VTKEEWQQGFVFSCSVMHEALHHYTQKSLSLSPGK | |
| 139 | APEAAGGPSVFLFPPKPKDTLMISRTPEVTCVVVDVSHEDPEVKFN | Clone CH3C.35.20.1 |
| | WYVDGVEVHNAKTKPREEQYNSTYRVVSVLTVLHQDWLNGKEY | with knob and LALAPG |
| | KCKVSNKALGAPIEKTISKAKGQPREPQVYTLPPSRDELTKNQVSL | mutations |
| | WCLVKGFYPSDIAVEWESFGTEWSSYKTTPPVLDSDGSFFLYSKLT | |
| | VTKEEWQQGFVFSCSVMHEALHNHYTQKSLSLSPGK | |
| 140 | APELLGGPSVFLFPPKPKDTLYITREPEVTCVVVDVSHEDPEVKFNW | Clone CH3C.35.20.1 |
| | YVDGVEVHNAKTKPREEQYNSTYRVVSVLTVLHQDWLNGKEYKC | with knob and YTE |
| | KVSNKALPAPIEKTISKAKGQPREPQVYTLPPSRDELTKNQVSLWCL | mutations |
| | VKGFYPSDIAVEWESFGTEWSSYKTTPPVLDSDGSFFLYSKLTVTKE | |
| | EWQQGFVFSCSVMHEALHNHYTQKSLSLSPGK | |
| 141 | APEAAGGPSVFLFPPKPKDTLYITREPEVTCVVVDVSHEDPEVKFN | Clone CH3C.35.20.1 |
| | WYVDGVEVHNAKTKPREEQYNSTYRVVSVLTVLHQDWLNGKEY | with knob, LALA, and |
| | KCKVSNKALPAPIEKTISKAKGQPREPQVYTLPPSRDELTKNQVSL | YTE mutations |
| | WCLVKGFYPSDIAVEWESFGTEWSSYKTTPPVLDSDGSFFLYSKLT | |
| | VTKEEWQQGFVFSCSVMHEALHNHYTQKSLSLSPGK | |
| 142 | APEAAGGPSVFLFPPKPKDTLYITREPEVTCVVVDVSHEDPEVKFN | Clone CH3C.35.20.1 |
| | WYVDGVEVHNAKTKPREEQYNSTYRVVSVLTVLHQDWLNGKEY | with knob, LALAPG, |
| | KCKVSNKALGAPIEKTISKAKGQPREPQVYTLPPSRDELTKNQVSL | and YTE mutations |
| | WCLVKGFYPSDIAVEWESFGTEWSSYKTTPPVLDSDGSFFLYSKLT | |
| | VTKEEWQQGFVFSCSVMHEALHNHYTQKSLSLSPGK | |
| 143 | APELLGGPSVFLFPPKPKDTLMISRTPEVTCVVVDVSHEDPEVKFN | Clone CH3C.35.20.1 |
| | WYVDGVEVHNAKTKPREEQYNSTYRVVSVLTVLHQDWLNGKEY | with hole mutations |
| | KCKVSNKALPAPIEKTISKAKGQPREPQVYTLPPSRDELTKNQVSLS | |
| | CAVKGFYPSDIAVEWESFGTEWSSYKTTPPVLDSDGSFFLVSKLTV | |
| | TKEEWQQGFVFSCSVMHEALHNHYTQKSLSLSPGK | |
| 144 | APEAAGGPSVFLFPPKPKDTLMISRTPEVTCVVVDVSHEDPEVKFN | Clone CH3C.35.20.1 |
| | WYVDGVEVHNAKTKPREEQYNSTYRVVSVLTVLHQDWLNGKEY | with hole and LALA |
| | KCKVSNKALPAPIEKTISKAKGQPREPQVYTLPPSRDELTKNQVSLS | mutations |
| | CAVKGFYPSDIAVEWESFGTEWSSYKTTPPVLDSDGSFFLVSKLTV | |
| | TKEEWQQGFVFSCSVMHEALHNHYTQKSLSLSPGK | |
| 145 | APEAAGGPSVFLFPPKPKDTLMISRTPEVTCVVVDVSHEDPEVKFN | Clone CH3C.35.20.1 |
| | WYVDGVEVHNAKTKPREEQYNSTYRVVSVLTVLHQDWLNGKEY | with hole and LALAPG |
| | KCKVSNKALGAPIEKTISKAKGQPREPQVYTLPPSRDELTKNQVSLS | mutations |
| | CAVKGFYPSDIAVEWESFGTEWSSYKTTPPVLDSDGSFFLVSKLTV | |
| | TKEEWQQGFVFSCSVMHEALHNHYTQKSLSLSPGK | |
| 146 | APELLGGPSVFLFPPKPKDTLYITREPEVTCVVVDVSHEDPEVKFNW | Clone CH3C.35.20.1 |
| | YVDGVEVHNAKTKPREEQYNSTYRVVSVLTVLHQDWLNGKEYKC | with hole and YTE |
| | KVSNKALPAPIEKTISKAKGQPREPQVYTLPPSRDELTKNQVSLSCA | mutations |
| | VKGFYPSDIAVEWESFGTEWSSYKTTPPVLDSDGSFFLVSKLTVTKE | |
| | EWQQGFVFSCSVMHEALHNHYTQKSLSLSPGK | |
| 147 | APEAAGGPSVFLFPPKPKDTLYITREPEVTCVVVDVSHEDPEVKFN | Clone CH3C.35.20.1 |
| | WYVDGVEVHNAKTKPREEQYNSTYRVVSVLTVLHQDWLNGKEY | with hole, LALA, and |
| | KCKVSNKALPAPIEKTISKAKGQPREPQVYTLPPSRDELTKNQVSLS | YTE mutations |
| | CAVKGFYPSDIAVEWESFGTEWSSYKTTPPVLDSDGSFFLYVSKLTV | |
| | TKEEWQQGFVFSCSVMHEALHNHYTQKSLSLSPGK | |
| 148 | APEAAGGPSVFLFPPKPKDTLYITREPEVTCVVVDVSHEDPEVKFN | Clone CH3C.35.20.1 |
| | WYVDGVEVHNAKTKPREEQYNSTYRVVSVLTVLHQDWLNGKEY | with hole, LALAPG, and |
| | KCKVSNKALGAPIEKTISKAKGQPREPQVYTLPPSRDELTKNQVSLS | YTE mutations |
| | CAVKGFYPSDIAVEWESFGTEWSSYKTTPPVLDSDGSFFLVSKLTV | |
| | TKEEWQQGFVFSCSVMHEALHNHYTQKSLSLSPGK | |
| 149 | APELLGGPSVFLFPPKPKDTLMISRTPEVTCVVVDVSHEDPEVKFN | Clone CH3C.35.23.2 |
| | WYVDGVEVHNAKTKPREEQYNSTYRVVSVLTVLHQDWLNGKEY | with knob mutation |
| | KCKVSNKALPAPIEKTISKAKGQPREPQVYTLPPSRDELTKNQVSL | |
| | WCLVKGFYPSDIAVEWESYGTEWANYKTTPPVLDSDGSFFLYSKL | |
| | TVTKEEWQQGFVFSCSVMHEALHNHYTQKSLSLSPGK | |
| 150 | APEAGGPSVFLFPPKPKDTLMISRTPEVTCVVVDVSHEDPEVKFN | Clone CH3C.35.23.2 |
| | WYVDGVEVHNAKTKPREEQYNSTYRVVSVLTVLHQDWLNGKEY | with knob and LALA |
| | KCKVSNKALPAPIEKTISKAKGQPREPQVYTLPPSRDELTKNQVSL | mutations |
| | WCLVKGFYPSDIAVEWESYGTEWANYKTTPPVLDSDGSFFLYSKL | |
| | TVTKEEWQQGFVFSCSVMHEALHNHYTQKSLSLSPGK | |
| 151 | APEAAGGPSVFLFPPKPKDTLMISRTPEVTCVVVDVSHEDPEVKFN | Clone CH3C.35.23.2 |
| | WYVDGVEVHNAKTKPREEQYNSTYRVVSVLTVLHQDWLNGKEY | with knob and LALAPG |
| | KCKVSNKALGAPIEKTISKAKGQPREPQVYTLPPSRDELTKNQVSL | mutations |
| | WCLVKGFYPSDIAVEWESYGTEWANYKTTPPVLDSDGFFLYSKL | |
| | TVTKEEWQQGFVFSCSVMHEALHNHYTQKSLSLSPGK | |
| 152 | APELLGGPSVFLFPPKPKDTLYITREPEVTCVVVDVSHEDPEVKFNW | Clone CH3C.35.23.2 |
| | YVDGVEVHNAKTKPREEQYNSTYRVVSVLTVLHQDWLNGKEYKC | with knob and YTE |
| | KVSNKALPAPIEKTISKAKGQPREPQVYTLPPSRDELTKNQVSLWCL | mutations |
| | VKGFYPSDIAVEWESYGTEWANYKTTPPVLDSDGSFFLYSKLTVTK | |
| | EEWQQGFVFSCSVMHEALHNHYTQKSLSLSPGK | |
| 153 | APEAAGGPSVFLFPPKPKDTLYITREPEVTCVVVDVSHEDPEVKFN | Clone CH3C.35.23.2 |
| | WYVDGVEVHNAKTKPREEQYNSTYRVVSVLTVLHQDWLNGKEY | with knob, LALA, and |
| | KCKVSNKALPAPIEKTISKAKGQPREPQVYTLPPSRDELTKNQVSL | YTE mutations |
| | WCLVKGFYPSDIAVEWESYGTEWANYKTTPPVLDSDGSFFLYSKL | |
| | TVTKEEWQQGFVFSCSVMHEALHNHYTQKSLSLSPGK | |
| 154 | APEAAGGPSVFLFPPKPKDTLYITREPEVTCVVVDVSHEDPEVKFN | Clone CH3C.35.23.2 |
| | WYVDGVEVHNAKTKPREEQYNSTYRVVSVLTVLHQDWLNGKEY | with knob, LALAPG, |
| | KCKVSNKALGAPIEKTISKAKGQPREPQVYTLPPSRDELTKNQVSL | and YTE mutations |
| | WCLVKGFYPSDIAVEWESYGTEWANYKTTPPVLDSDGSFFLYSKL | |
| | TVTKEEWQQGFVFSCSVMHEALHNHYTQKSLSLSPGK | |
| 155 | APELLGGPSVFLFPPKPKDTLMISRTPEVTCVVVDVSHEDPEVKFN | Clone CH3C.35.23.2 |
| | WYVDGVEVHNAKTKPREEQYNSTYRVVSVLTVLHQDWLNGKEY | with hole mutations |
| | KCKVSNKALPAPIEKTISKAKGQPREPQVYTLPPSRDELTKNQVSLS | |
| | CAVKGFYPSDIAVEWESYGTEWANYKTTPPVLDSDGSFFLVSKLTV | |
| | TKEEWQQGFVFSCSVMHEALHNHYTAKSLSLSPGK | |
| 156 | APEAAGGPSVFLFPPKPKDTLMISRTPEVTCVVVDVSHEDPEVKFN | Clone CH3C.35.23.2 |
| | WYVDGVEVHNAKTKPREEQYNSTYRVVSVLTVLHQDWLNGKEY | with hole and LALA |
| | KCKVSNKALPAPIEKTISKAKGQPREPQVYTLPPSRDELTKNQVSLS | mutations |
| | CAVKGFYPSDIAVEWESYGTEWANYKTTPPVLDSDGSFFLVSKLTV | |
| | TKEEWQQGFVFSCSVMHEALHNHYTQKSLSLSPGK | |
| 157 | APEAAGGPSVFLFPPKPKDTLMISRTPEVTCVVVDVSHEDPEVKFN | Clone CH3C.35.23.2 |
| | WYVDGVEVHNAKTKPREEQYNSTYRVVSVLTVLHQDWLNGKEY | with hole and LALAPG |
| | KCKVSNKALGAPIEKTISKAKGQPREPQVYTLPPSRDELTKNQVSLS | mutations |
| | CAVKGFYPSDIAVEWESYGTEWANYKTTPPVLDSDGSFFLVSKLTV | |
| | TKEEWQQGFVFSCSVMHEALHNHYTQKSLSLSPGK | |
| 158 | APELLGGPSVFLFPPKPKDTLYITREPEVTCVVVDVSHEDPEVKFNW | Clone CH3C.35.23.2 |
| | YVDGVEVHNAKTKPREEQYNSTYRVVSVLTVLHQDWLNGKEYKC | with hole and YTE |
| | KVSNKALPAPIEKTISKAKGQPREPQVYTLPPSRDELTKNQVSLSCA | mutations |
| | VKGFYPSDIAVEWESYGTEWANYKTTPPVLDSDGSFFLVSKLTVTK | |
| | EEWQQGFVFSCSVMHEALHNHYTQKSLSLSPGK | |
| 159 | APEAAGGPSVFLFPPKPKDTLYITREPEVTCVVVDVSHEDPEVKFN | Clone CH3C.35.23.2 |
| | WYVDGVEVHNAKTKPREEQYNSTYRVVSVLTVLHQDWLNGKEY | with hole, LALA, and |
| | KCKVSNKALPAPIEKTISKAKGQPREPQVYTLPPSRDELTKNQVSLS | YTE mutations |
| | CAVKGFYPSDIAVEWESYGTEWANYKTTPPVLDSDGSFFLVSKLTV | |
| | TKEEWQQGFVFSCSVMHEALHNHYTQKSLSLSPGK | |
| 160 | APEAAGGPSVFLFPPKPKDTLYITREPEVTCVVVDVSHEDPEVKFN | Clone CH3C.35.23.2 |
| | WYVDGVEVHNAKTKPREEQYNSTYRVVSVLTVLHQDWLNGKEY | with hole, LALAPG, and |
| | KCKVSNKALGAPIEKTISKAKGQPREPQVYTLPPSRDELTKNQVSLS | YTE mutations |
| | CAVKGFYPSDIAVEWESYGTEWANYKTTPPVLDSDGSFFLVSKLTV | |
| | TKEEWQQGFVFSCSVMHEALHNHYTQKSLSLSPGK | |
| 161 | APELLGGPSVFLFPPKPKDTLMISRTPEVTCVVVDVSHEDPEVKFN | Clone CH3C.35.23.3 |
| | WYVDGVEVHNAKTKPREEQYNSTYRVVSVLTVLHQDWLNGKEY | with knob mutation |
| | KCKVSNKALPAPIEKTISKAKGQPREPQVYTLPPSRDELTKNQVSL | |
| | WCLVKGFYPSDIAVEWESYGTEWVNYKTTPPVLDSDGSFFLYSKL | |
| | TVTKEEWQQGFVFSCSVMHEALHNHYTQKSLSLSPGK | |
| 162 | APEAAGGPSVFLFPPKPKDTLMISRTPEVTCVVVDVSHEDPEVKFN | Clone CH3C.35.23.3 |
| | WYVDGVEVHNAKTKPREEQYNSTYRVVSVLTVLHQDWLNGKEY | with knob and LALA |
| | KCKVSNKALPAPIEKTISKAKGQPREPQVYTLPPSRDELTKNQVSL | mutations |
| | WCLVKGFYPSDIAVEWESYGTEWVNYKTTPPVLDSDGSFFLYSKL | |
| | TVTKEEWQQGFVFSCSVMHEALHNHYTQKSLSLSPGK | |
| 163 | APEAAGGPSVFLFPPKPKDTLMISRTPEVTCVVVDVSHEDPEVKFN | Clone CH3C.35.23.3 |
| | WYVDGVEVHNAKTKPREEQYNSTYRVVSVLTVLHQDWLNGKEY | with knob and LALAPG |
| | KCKVSNKALGAPIEKTISKAKGQPREPQVYTLPPSRDELTKNQVSL | mutations |
| | WCLVKGFYPSDIAVEWESYGTEWVNYKTTPPVLDSDGSFFLYSKL | |
| | TVTKEEWQQGFVFSCSVMHEALHNHYTQKSLSLSPGK | |
| 164 | APELLGGPSVFLFPPKPKDTLYITREPEVTCVVVDVSHEDPEVKFNW | Clone CH3C.35.23.3 |
| | YVDGVEVHNAKTKPREEQYNSTYRVVSVLTVLHQDWLNGKEYC | with knob and YTE |
| | KVSNKALPAPIEKTISKAKGQPREPQVYTLPPSRDELTKNQVSLWCL | mutations |
| | VKGFYPSDIAVEWESYGTEWVNYKTTPPVLDSDGSFFLYSKLTVTK | |
| | EEWQQGFVFSCSVMHEALHNHYTQKSLSLSPGK | |
| 165 | APEAAGGPSVFLFPPKPKDTLYITREPEVTCVVVDVSHEDPEVKFN | Clone CH3C.35.23.3 |
| | WYVDGVEVHNAKTKPREEQYNSTYRVVSVLTVLHQDWLNGKEY | with knob, LALA, and |
| | KCKVSNKALPAPIEKTISKAKGQPREPQVYTLPPSRDELTKNQVSL | YTE mutations |
| | WCLVKGFYPSDIAVEWESYGTEWVNYKTTPPVLDSDGSFFLYSKL | |
| | TVTKEEWQQGFVFSCSVMHEALHNHYTQKSLSLSPGK | |
| 166 | APEAAGGPSVFLFPPKPKDTLYITREPEVTCVVVDVSHEDPEVKFN | Clone CH3C.35.23.3 |
| | WYVDGVEVHNAKTKPREEQYNSTYRVVSVLTVLHQDWLNGKEY | with knob, LALAPG, |
| | KCKVSNKALGAPIEKTISKAKGQPREPQVYTLPPSRDELTKNQVSL | and YTE mutations |
| | WCLVKGFYPSDIAVEWESYGTEWVNYKTTPPVLDSDGSFFLYSKL | |
| | TVTKEEWQQGFVFSCSVMHEALHNHYTQKSLSLSPGK | |
| 167 | APELLGGPSVFLFPPKPKDTLMISRTPEVTCVVVDVSHEDPEVKFN | Clone CH3C.35.23.3 |
| | WYVDGVEVHNAKTKPREEQYNSTYRVVSVLTVLHQDWLNGKEY | with hole mutations |
| | KCKVSNKALPAPIEKTISKAKGQPREPQVYTLPPSRDELTKNQVSLS | |
| | CAVKGFYPSDIAVEWESYGTEWVNYKTTPPVLDSDGSFFLVSKLTV | |
| | TKEEWQQGFVFSCSVMHEALHNHYTQKSLSLSPGK | |
| 168 | APEAAGGPSVFLFPPKPKDTLMISRTPEVTCVVVDVSHEDPEVKFN | Clone CH3C.35.23.3 |
| | WYVDGVEVHNAKTKPREEQYNSTYRVVSVLTVLHQDWLNGKEY | with hole and LALA |
| | KCKVSNKALPAPIEKTISKAKGQPREPQVYTLPPSRDELTKNQVSLS | mutations |
| | CAVKGFYPSDIAVEWESYGTEWVNYKTTPPVLDSDGSFFLVSKLTV | |
| | TKEEWQQGFVFSCSVMHEALHNHYTQKSLSLSPGK | |
| 169 | APEAAGGPSVFLFPPKPKDTLMISRTPEVTCVVVDVSHEDPEVKFN | Clone CH3C.35.23.3 |
| | WYVDGVEVHNAKTKPREEQYNSTYRVVSVLTVLHQDWLNGKEY | with hole and LALAPG |
| | KCKVSNKALGAPIEKTISKAKGQPREPQVYTLPPSRDELTKNQVSLS | mutations |
| | CAVKGFYPSDIAVEWESYGTEWVNYKTTPPVLDSDGSFFLVSKLTV | |
| | TKEEWQQGFVFSCSVMHEALHNHYTQKSLSLSPGK | |
| 170 | APELLGGPSVFLFPKKPKDTLYITREPEVTCVVVDVSHEDPEVKFNW | Clone CH3C.35.23.3 |
| | YVDGVEVHNAKTKPREEQYNSTYRVVSVLTVLHQDWLNGKEYKC | with hole and YTE |
| | KVSNKALPAPIEKTISKAKGQPREPQVYTLPPSRDELTKNQVSLSCA | mutations |
| | VKGFYPSDIAVEWESYGTEWVNYKTTPPVLDSDGSFFLVSKLTVTK | |
| | EEWQQGFVFSCSVMHEALHNHYTQKSLSLSPGK | |
| 171 | APEAAGGPSVFLFPPKPKDTLYITREPEVTCVVVDVSHEDPEVKFN | Clone CH3C.35.23.3 |
| | WYVDGVEVHNAKTKPREEQYNSTYRVVSVLTVLHQDWLNGKEY | with hole, LALA, and |
| | KCKVSNKALPAPIEKTISKAKGQPREPQVYTLPPSRDELTKNQVSLS | YTE mutations |
| | CAVKGFYPSDIAVEWESYGTEWVNYKTTPPVLDSDGSFFLVSKLTV | |
| | TKEEWQQGFVFSCSVMHEALHNHYTQKSLSLSPGK | |
| 172 | APEAAGGPSVFLFPPKPKDTLYITREPEVTCVVVDVSHEDPEVKFN | Clone CH3C.35.23.3 |
| | WYVDGVEVHNAKTKPREEQYNSTYRVVSVLTVLHQDWLNGKEY | with hole, LALAPG, and |
| | KCKVSNKALGAPIEKTISKAKGQPREPQVYTLPPSRDELTKNQVSLS | YTE mutations |
| | CAVKGFYPSDIAVEWESYGTEWVNYKTTPPVLDSDGSFFLVSKLTV | |
| | TKEEWQQGFVFSCSVMHEALHNHYTQKSLSLSPGK | |
| 173 | APELLGGPSVFLFPPKPKDTLMISRTPEVTCVVVDVSHEDPEVKFN | Clone CH3C.35.23.4 |
| | WYVDGVEVHNAKTKPREEQYNSTYRVVSVLTVLHQDWLNGKEY | with knob mutation |
| | KCKVSNKALPAPIEKTISKAKGQPREPQVYTLPPSRDELTKNQVSL | |
| | WCLVKGFYPSDIAVEWESYGTEWSNYKTTPPVLDSDGSFFLYSKLT | |
| | VSKEEWQQGFVFSCSVMHEALHNHYTQKSLSLSPGK | |
| 174 | APEAAGGPSVFLFPPKPKDTLMISRTPEVTCVVVDVSHEDPEVKFN | Clone CH3C.35.23.4 |
| | WYVDGVEVHNAKTKPREEQYNSTYRVVSVLTVLHQDWLNGKEY | with knob and LALA |
| | KCKVSNKALPAPIEKTISKAKGQPREPQVYTLPPSRDELTKNQVSL | mutations |
| | WCLVKGFYPSDIAVEWESYGTEWSNYKTTPPVLDSDGSFFLYSKLT | |
| | VSKEEWQQGFVFSCSVMHEALHNHYTQKSLSLSPGK | |
| 175 | APEAAGGPSVFLFPPKPKDTLMISRTPEVTCVVVDVSHEDPEVKFN | Clone CH3C.35.23.4 |
| | WYVDGVEVHNAKTKPREEQYNSTYRVVSVLTVLHQDWLNGKEY | with knob and LALAPG |
| | KCKVSNKALGAPIEKTISKAKGQPREPQVYTLPPSRDELTKNQVSL | mutations |
| | WCLVKGFYPSDIAVEWESYGTEWSNYKTTPPVLDSDGSFFLYSKLT | |
| | VSKEEWQQGFVFSCSVMHEALHNHYTQKSLSLSPGK | |
| 176 | APELLGGPSVFLFPPKPKDTLYITREPEVTCVVVDVSHEDPEVKFNW | Clone CH3C.35.23.4 |
| | YVDGVEVHNAKTKPREEQYNSTYRVVSVLTVLHQDWLNGKEYKC | with knob and YTE |
| | KVSNKALPAPIEKISKAKGQPREPQVYTLPPSRDELTKNQVSLWCL | mutations |
| | VKGFYPSDIAVEWESYGTEWSNKTTPPVLDSDGSFFLYSKLTVSK | |
| | EEWQQGFVFSCSVMHEALHNHYTQKSLSLSPGK | |
| 177 | APEAAGGPSVFLFPPKPKDTLYITREPEVTCVVVDVSHEDPEVKFN | Clone CH3C.35.23.4 |
| | WYVDGVEVHNAKTKPREEQYNSTYRVVSVLTVLHQDWLNGKEY | with knob, LALA, and |
| | KCKVSNKALPAPIEKTISKAKGQPREPQVYTLPPSRDELTKNQVSL | YTE mutations |
| | WCLVKGFYPSDIAVEWESYGTEWSNYKTTPPVLDSDGSFFLYSKLT | |
| | VSKEEWQQGFVFSCSVMHEALHNHYTQKSLSLSPGK | |
| 178 | APEAAGGPSVFLFPPKPKDTLYITREPEVTCVVVDVSHEDPEVKFN | Clone CH3C.35.23.4 |
| | WYVDGVEVHNAKTKPREEQYNSTYRVVSVLTVLHQDWLNGKEY | with knob, LALAPG, |
| | KCKVSNKALGAPIEKTISKAKGQPREPQVYTLPPSRDELTKNQVSL | and YTE mutations |
| | WCLVKGFYPSDIAVEWESYGTEWSNYKTTPPVLDSDGSFFLYSKLT | |
| | VSKEEWQQGFVFSCSVMHEALHNHYTQKSLSLSPGK | |
| 179 | APELLGGPSVFLFPPKPKDTLMISRTPEVTCVVVDVSHEDPEVKFN | Clone CH3C.35.23.4 |
| | WYVDGVEVHNAKTKPREEQYNSTYRVVSVLTVLHQDWLNGKEY | with hole mutations |
| | KCKVSNKALPAPIEKTISKAKGQPREPQVYTLPPSRDELTKNQVSLS | |
| | CAVKGFYPSDIAVEWESYGTEWSNYKTTPPVLDSDGSFFLVSKLTV | |
| | SKEEWQQGFVFSCSVMHEALHNHYTQKSLSLSPGK | |
| 180 | APEAAGGPSVFLFPPKPKDTLMISRTPEVTCVVVDVSHEDPEVKFN | Clone CH3C.35.23.4 |
| | WYVDGVEVHNAKTKPREEQYNSTYRVVSVLTVLHQDWLNGKEY | with hole and LALA |
| | KCKVSNKALPAPIEKTISKAKGQPREPQVYTLPPSRDELTKNQVSLS | mutations |
| | CAVKGFYPSDIAVEWESYGTEWSNYKTTPPVLDSDGSFFLYVSKLTV | |
| | SKEEWQQGFVFSCSVMHEALHNHYTQKSLSLSPGK | |
| 181 | APEAAGGPSVFLFPPKPKDTLMISRTPEVTCVVVDVSHEDPEVKFN | Clone CH3C.35.23.4 |
| | WYVDGVEVHNAKTKPREEQYNSTYRVVSVLTVLHQDWLNGKEY | with hole and LALAPG |
| | KCKVSNKALGAPIEKTISKAKGQPREPQVYTLPPSRDELTKNQVSLS | mutations |
| | CAVKGFYPSDIAVEWESYGTEWSNYKTTPPVLDSDGSFFLVSKLTV | |
| | SKEEWQQGFVFSCSVMHEALHNHYTQKSLSLSPGK | |
| 182 | APELLGGPSVFLFPPKPKDTLYITREPEVTCVVVDVSHEDPEVKFNW | Clone CH3C.35.23.4 |
| | YVDGVEVHNAKTKPREEQYNSTYRVVSVLTVLHQDWLNGKEYKC | with hole and YTE |
| | KVSNKALPAPIEKTISKAKGQPREPQVYTLPPSRDELTKNQVSLSCA | mutations |
| | VKGFYPSDIAVEWESYGTEWSNYKTTPPVLDSDGSFFLVSKLTVSK | |
| | EEWQQGFVFSCSVMHEALHNHYTQKSLSLSPGK | |
| 183 | APEAAGGPSVFLFPPKPKDTLYITREPEVTCVVVDVSHEDPEVKFN | Clone CH3C.35.23.4 |
| | WYVDGVEVHNAKTKPREEQYNSTYRVVSVLTVLHQDWLNGKEY | with hole, LALA, and |
| | KCKVSNKALPAPIEKTISKAKGQPREPQVYTLPPSRDELTKNQVSLS | YTE mutations |
| | CAVKGFYPSDIAVEWESYGTEWSNYKTTPPVLDSDGSFFLVSKLTV | |
| | SKEEWQQGFVFSCSVMHEALHNHYTQKSLSLSPGK | |
| 184 | APEAAGGPSVFLFPPKPKDTLYITREPEVTCVVVDVSHEDPEVKFN | Clone CH3C.35.23.4 |
| | WYVDGVEVHNAKTKPREEQYNSTYRVVSVLTVLHQDWLNGKEY | with hole, LALAPG, and |
| | KCKVSNKALGAPIEKTISKAKGQPREPQVYTLPPSRDELTKNQVSLS | YTE mutations |
| | CAVKGFYPSDIAVEWESYGTEWSNYKTTPPVLDSDGSFFLVSKLTV | |
| | SKEEWQQGFVFSCSVMHEALHNHYTQKSLSLSPGK | |
| 185 | APELLGGPSVFLFPPKPKDTLMISRTPEVTCVVVDVSHEDPEVKFN | Clone CH3C.35.21.17.2 |
| | WYVDGVEVHNAKTKPREEQYNSTYRVVSVLTVLHQDWLNGKEY | with knob mutation |
| | KCKVSNKALPAPIEKTISKAKGQPREPQVYTLPPSRDELTKNQVSL | |
| | WCLVKGFYPSDIAVLWESYGTEWASYKTTPPVLDSDGSFFLYSKLT | |
| | VTKEEWQQGFVFSCSVMHEALHNHYTQKSLSLSPGK | |
| 186 | APEAAGGPSVFLFPPKPKDTLMISRTPEVTCVVVDVSHEDPEVKFN | Clone CH3C.35.21.17.2 |
| | WYVDGVEVHNAKTKPREEQYNSTYRVVSVLTVLHQDWLNGKEY | with knob and LALA |
| | KCKVSNKALPAPIEKTISKAKGQPREPQVYTLPPSRDELTKNQVSL | mutations |
| | WCLVKGFYPSDIAVLWESYGTEWASYKTTPPVLDSDGSFFLYSKLT | |
| | VTKEEWQQGFVFSCSVMHEALHNHYTQKSLSLSPGK | |
| 187 | APEAAGGPSVFLFPPKPKDTLMISRTPEVTCVVVDVSHEDPEVKFN | Clone CH3C.35.21.17.2 |
| | WYVDGVEVHNAKTKPREEQYNSTYRVVSVLTVLHQDWLNGKEY | with knob and LALAPG |
| | KCKVSNKALGAPIEKTISKAKGQPREPQVYTLPPSRDELTKNQVSL | mutations |
| | WCLVKGFYPSDIAVLWESYGTEWASYKTTPPVLDSDGSFFLYSKLT | |
| | VTKEEWQQGFVFSCSVMHEALHNHYTQKSLSLSPGK | |
| 188 | APELLGGPSVFLFPPKPKDTLYITREPEVTCVVVDVSHEDPEVKFNW | Clone CH3C.35.21.17.2 |
| | YVDGVEVHNAKTKPREEQYNSTYRVVSVLTVLHQDWLNGKEYKC | with knob and YTE |
| | KVSNKALPAPIEKTISKAKGQPREPQVYTLPPSRDELTKNQVSLWCL | mutations |
| | VKGFYPSDIAVLWESYGTEWASYKTTPPVLDSDGSFFLYSKLTVTK | |
| | EEWQQGFVFSCSVMHEALHNHYTQKSLSLSPGK | |
| 189 | APEAAGGPSVFLFPPKPKDTLYITREPEVTCVVVDVSHEDPEVKFN | Clone CH3C.35.21.17.2 |
| | WYVDGVEVHNAKTKPREEQYNSTYRVVSVLTVLHQDWLNGKEY | with knob, LALA, and |
| | KCKVSNKALPAPIEKTISKAKGQPREPQVYTLPPSRDELTKNQVSL | YTE mutations |
| | WCLVKGFYPSDIAVLWESYGTEWASYKTTPPVLDSDGSFFLYSKLT | |
| | VTKEEWQQGFVFSCSVMHEALHNHYTQKSLSLSPGK | |
| 190 | APEAAGGPSVFLFPPKPKDTLYITREPEVTCVVVDVSHEDPEVKFN | Clone CH3C.35.21.17.2 |
| | WYVDGVEVHNAKTKPREEQYNSTYRVVSVLTVLHQDWLNGKEY | with knob, LALAPG, |
| | KCKVSNKALGAPIEKTISKAKGQPREPQVYTLPPSRDELTKNQVSL | and YTE mutations |
| | WCLVKGFYPSDIAVLWESYGTEWASYKTTPPVLDSDGSFFLYSKLT | |
| | VTKEEWQQGFVFSCSVMHEALHNHYTQKSLSLSPGK | |
| 191 | APELLGGPSVFLFPPKPKDTLMISRTPEVTCVVVDVSHEDPEVKFN | Clone CH3C.35.21.17.2 |
| | WYVDGVEVHNAKTKPREEQYNSTYRVVSVLTVLHQDWLNGKEY | with hole mutations |
| | KCKVSNKALPAPIEKTISKAKGQPREPQVYTLPPSRDELTKNQVSLS | |
| | CAVKGFYPSDIAVLWESYGTEWASYKTTPPVLDSDGSFFLVSKLTV | |
| | TKEEWQQGFVFSCSVMHEALHNHYTQKSLSLSPGK | |
| 192 | APEAAGGPSVFLFPPKPKDTLMISRTPEVTCVVVDVSHEDPEVKFN | Clone CH3C.35.21.17.2 |
| | WYVDGVEVHNAKTKPREEQYNSTYRVVSVLTVLHQDWLNGKEY | with hold and LALA |
| | KCKVSNKALPAPIEKTISKAKGQPREPQVYTLPPSRDELTKNQVSLS | mutations |
| | CAVKGFYPSDIAVLWESYGTEWASYKTTPPVLDSDGSFFLVSKLTV | |
| | TKEEWQQGFVFSCSVMHEALHNHYTQKSLSLSPGK | |
| 193 | APEAAGGPSVFLFPPKPKDTLMISRTPEVTCVVVDVSHEDPEVKFN | Clone CH3C.35.21.17.2 |
| | WYVDGVEVHNAKTKPREEQYNSTYRVVSVLTVLHQDWLNGKEY | with hole and LALAPG |
| | KCKVSNKALGAPIEKTISKAKGQPREPQVYTLPPSRDELTKNQVSLS | mutations |
| | CAVKGFYPSDIAVLWESYGTEWASYKTTPPVLDSDGSFFLVSKLTV | |
| | TKEEWQQGFVFSCSVMHEALHNHYTQKSLSLSPGK | |
| 194 | APELLGGPSVFLFPPKPKDTLYITREPEVTCVVVDVSHEDPEVKFNW | Clone CH3C.35.21.17.2 |
| | YVDGVEVHNAKTKPREEQYNSTYRVVSVLTVLHQDWLNGKEYKC | with hole and YTE |
| | KVSNKALPAPIEKTISKAKGQPREPQVYTLPPSRDELTKNQVSLSCA | mutations |
| | VKGFYPSDIAVLWESYGTEWASYKTTPPVLDSDGSFFLVSKLTVTK | |
| | EEWQQGFVFSCSVMHEALHNHYTQKSLSLSPGK | |
| 195 | APEAAGGPSVFLFPPKPKDTLYITREPEVTCVVVDVSHEDPEVKFN | Clone CH3C.35.21.17.2 |
| | WYVDGVEVHNAKTKPREEQYNSTYRVVSVLTVLHQDWLNGKEY | with hole, LALA, and |
| | KCKVSNKALPAPIEKTISKAKGQPREPQVYTLPPSRDELTKNQVSLS | YTE mutations |
| | CAVKGFYPSDIAVLWESYGTEWASYKTTPPVLDSDGSFFLVSKLTV | |
| | TKEEWQQGFVFSCSVMHEALHNHYTQKSLSLSPGK | |
| 196 | APEAAGGPSVFLFPPKPKDTLYITREPEVTCVVVDVSHEDPEVKFN | Clone CH3C.35.21.17.2 |
| | WYVDGVEVHNAKTKPREEQYNSTYRVVSVLTVLHQDWLNGKEY | with hole, LALAPG, and |
| | KCKVSNKALGAPIEKTISKAKGQPREPQVYTLPPSRDELTKNQVSLS | YTE mutations |
| | CAVKGFYPSDIAVLWESYGTEWASYKTTPPVLDSDGSFFLVSKLTV | |
| | TKEEWQQGFVFSCSVMHEALHNHYTQKSLSLSPGK | |
| 197 | APELLGGPSVFLFPPKPKDTLMISRTPEVTCVVVDVSHEDPEVKFN | Clone CH3C.35.23 with |
| | WYVDGVEVHNAKTKPREEQYNSTYRVVSVLTVLHQDWLNGKEY | knob mutation |
| | KCKVSNKALPAPIEKTISKAKGQPREPQVYTLPPSRDELTKNQVSL | |
| | WCLVKGFYPSDIAVEWESYGTEWSNYKTTPPVLDSDGSFFLYSKLT | |
| | VTKEEWQQGFVFSCSVMHEALHNHYTQKSLSLSPGK | |
| 198 | APEAAGGPSVFLFPPKPKDTLMISRTPEVTCVVVDVSHEDPEVKFN | Clone CH3C.35.23 with |
| | WYVDGVEVHNAKTKPREEQYNSTYRVVSVLTVLHQDWLNGKEY | knob and LALA |
| | KCKVSNKALPAPIEKTISKAKGQPREPQVYTLPPSRDELTKNQVSL | mutations |
| | WCLVKGFYPSDIAVEWESYGTEWSNYKTTPPVLDSDGSFFLYSKLT | |
| | VTKEEWQQGFVFSCSVMHEALHNHYTQKSLSLSPGK | |
| 199 | APEAAGGPSVFLFPPKPKDTLMISRTPEVTCVVVDVSHEDPEVKFN | Clone CH3C.35.23 with |
| | WYVDGVEVHNAKTKPREEQYNSTYRVVSVLTVLHQDWLNGKEY | knob and LALAPG |
| | KCKVSNKALGAPIEKTISKAKGQPREPQVYTLPPSRDELTKNQVSL | mutations |
| | WCLVKGFYPSDIAVEWESYGTEWSNYKTTPPVLDSDGSFFLYSKLT | |
| | VTKEEWQQGFVFSCSVMHEALHNHYTQKSLSLSPGK | |
| 200 | APELLGGPSVFLFPPKPKDTLYITREPEVTCVVVDVSHEDPEVKFNW | Clone CH3C.35.23 with |
| | YVDGVEVHNAKTKPREEQYNSTYRVVSVLTVLHQDWLNGKEYKC | knob and YTE mutations |
| | KVSNKALPAPIEKTISKAKGQPREPQVYTLPPSRDELTKNQVSLWCL | |
| | VKGFYPSDIAVEWESYGTEWSNYKTTPPVLDSDGSFFLYSKLTVTK | |
| | EEWQQGFVFSCSVMHEALHNHYTQKSLSLSPGK | |
| 201 | APEAAGGPSVFLFPPKPKDTLYITREPEVTCVVVDVSHEDPEVKFN | Clone CH3C.35.23 with |
| | WYVDGVEVHNAKTKPREEQYNSTYRVVSVLTVLHQDWLNGKEY | knob, LALA, and YTE |
| | KCKVSNKALPAPIEKTISKAKGQPREPQVYTLPPSRDELTKNQVSL | mutations |
| | WCLVKGFYPSDIAVEWESYGTEWSNYKTTPPVLDSDGSFFLYSKLT | |
| | VTKEEWQQGFVFSCSVMHEALHNHYTQKSLSLSPGK | |
| 202 | APEAAGGPSVFLFPPKPKDTLYITREPEVTCVVVDVSHEDPEVKFN | Clone CH3C.35.23 with |
| | WYVDGVEVHNAKTKPREEQYNSTYRVVSVLTVLHQDWLNGKEY | knob, LALAPG, and |
| | KCKVSNKALGAPIEKTISKAKGQPREPQVYTLPPSRDELTKNQVSL | YTE mutations |
| | WCLVKGFYPSDIAVEWESYGTEWSNYKTTPPVLDSDGSFFLYSKLT | |
| | VTKEEWQQGFVFSCSVMHEALHNHYTQKSLSLSPGK | |
| 203 | APELLGGPSVFLFPPKPKDTLMISRTPEVTCVVVDVSHEDPEVKFN | Clone CH3C.35.23 with |
| | WYVDGVEVHNAKTKPREEQYNSTYRVVSVLTVLHQDWLNGKEY | hole mutations |
| | KCKVSNKALPAPIEKTISKAKGQPREPQVYTLPPSRDELTKNQVSLS | |
| | CAVKGFYPSDIAVEWESYGTEWSNYKTTPPVLDSDGSFFLVSKLTV | |
| | TKEEWQQGFVFSCSVMHEALHNHYTQKSLSLSPGK | |
| 204 | APEAAGGPSVFLFPPKPKDTLMISRTPEVTCVVVDVSHEDPEVKFN | Clone CH3C.35.23 with |
| | WYVDGVEVHNAKTKPREEQYNSTYRVVSVLTVLHQDWLNGKEY | hole and LALA |
| | KCKVSNKALPAPIEKTISKAKGQPREPQVYTLPPSRDELTKNQVSLS | mutations |
| | CAVKGFYPSDIAVEWESYGTEWSNYKTTPPVLDSDGSFFLVSKLTV | |
| | TKEEWQQGFVFSCSVMHEALHNHYTQKSLSLSPGK | |
| 205 | APEAAGGPSVFLFPPKPKDTLMISRTPEVTCVVVDVSHEDPEVKFN | Clone CH3C.35.23 with |
| | WYVDGVEVHNAKTKPREEQYNSTYRVVSVLTVLHQDWLNGKEY | hole and LALAPG |
| | KCKVSNKALGAPIEKTISKAKGQPREPQVYTLPPSRDELTKNQVSLS | mutations |
| | CAVKGFYPSDIAVEWESYGTEWSNYKTTPPVLDSDGSFFLVSKLTV | |
| | TKEEWQQGFVFSCSVMHEALHNHYTQKSLSLSPGK | |
| 206 | APELLGGPSVFLFPPKPKDTLYITREPEVTCVVVDVSHEDPEVKFNW | Clone CH3C.35.23 with |
| | YVDGVEVHNAKTKPREEQYNSTYRVVSVLTVLHQDWLNGKEYKC | hole and YTE mutations |
| | KVSNKALPAPIEKTISKAKGQPREPQVYTLPPSRDELTKNQVSLSCA | |
| | VKGFYPSDIAVEWESYGTEWSNYKTTPPVLDSDGSFFLVSKLTVTK | |
| | EEWQQGFVFSCSVMHEALHNHYTQKSLSLSPGK | |
| 207 | APEAAGGPSVFLFPPKPKDTLYITREPEVTCVVVDVSHEDPEVKFN | Clone CH3C.35.23 with |
| | WYVDGVEVHNAKTKPREEQYNSTYRVVSVLTVLHQDWLNGKEY | hole, LALA, and YTE |
| | KCKVSNKALPAPIEKTISKAKGQPREPQVYTLPPSRDELTKNQVSLS | mutations |
| | CAVKGFYPSDIAVEWESYGTEWSNYKTTPPVLDSDGSFFLVSKLTV | |
| | TKEEWQQGFVFSCSVMHEALHNHYTQKSLSLSPGK | |
| 208 | APEAAGGPSVFLFPPKPKDTLYITREPEVTCVVVDVSHEDPEVKFN | Clone CH3C.35.23 with |
| | WYVDGVEVHNAKTKPREEQYNSTYRVVSVLTVLHQDWLNGKEY | hole, LALAPG, and |
| | KCKVSNKALGAPIEKTISKAKGQPREPQVYTLPPSRDELTKNQVSLS | YTE mutations |
| | CAVKGFYPSDIAVEWESYGTEWSNYKTTPPVLDSDGSFFLVSKLTV | |
| | TKEEWQQGFVFSCSVMHEALHNHYTQKSLSLSPGK | |
| 209 | DKTHTCPPCPAPEAAGGPSVFLFPPKPKDTLMISRTPEVTCVVVDVS | Clone CH3C.35.21.17.2 |
| | HEDPEVKFNWYVDGVEVHNAKTKPREEQYNSTYRVVSVLTVLHQ | with knob and LALA |
| | DWLNGKEYKCKVSNKALPAPIEKTISKAKGQPREPQVYTLPPSRDE | mutations and portion of |
| | LTKNQVSLWCLVKGFYPSDIAVLWESYGTEWASYKTTPPVLDSDG | human IgG1 hinge |
| | SFFLYSKLTVTKEEWQQGFVFSCSVMHEALHNHYTQKSLSLSPGK | sequence |
| 210 | DKTHTCPPCPAPEAAGGPSVFLFPPKPKDTLMISRTPEVTCVVVDVS | Clone CH3C.35.23.2 |
| | HEDPEVKFNWYVDGVEVHNAKTKPREEQYNSTYRVVSVLTVLHQ | with knob and LALA |
| | DWLNGKEYKCKVSNKALPAPIEKTISKAKGQPREPQVYTLPPSRDE | mutations and portion of |
| | LTKNQVSLWCLVKGFYPSDIAVEWESYGTEWANYKTTPPVLDSDG | human IgG1 hinge |
| | SFFLYSKLTVTKEEWQQGFVFSCSVMHEALHNHYTQKSLSLSPGK | sequence |
| 211 | MWTLVSWVALTAGLVAGTRCPDGQFCPVACCLDPGGASYSCCRP | pre-mature progranulin |
| | LLDKWPTTLSRHLGGPCQVDAHCSAGHSCIFTVSGTSSCCPFPEAV | (PGRN) polypeptide |
| | ACGDGHHCCPRGFHCSADGRSCFQRSGNNSVGAIQCPDSQFECPDF | |
| | STCCVMVDGSWGCCPMPQASCCEDRVHCCPHGAFCDLVHTRCITP | |
| | TGTHPLAKKLPAQRTNRAVALSSSVMCPDARSRCPDGSTCCELPSG | |
| | KYGCCPMPNATCCSDHLHCCPQDTVCDLIQSKCLSKENATTDLLTK | |
| | LPAHTVGDVKCDMEVSCPDGYTCCRLQSGAWGCCPFTQAVCCED | |
| | HIHCCPAGFTCDTQKGTCEQGPHQVPWMEKAPAHLSLPDPQALKR | |
| | DVPCDNVSSCPSSDTCCQLTSGEWGCCPIPEAVCCSDHQHCCPQGY | |
| | TCVAEGQCQRGSEIVAGLEKMPARRASLSHPRDIGCDQHTSCPVGQ | |
| | TCCPSLGGSWACCQLPHAVCCEDRQHCCPAGYTCNVKARSCEKEV | |
| | VSAQPATFLARSPHVGVKDVECGEGHFCHDNQTCCRDNRQGWAC | |
| | CPYRQGVCCADRRHCCPAGFRCAARGTKCLRREAPRWDAPLRDP | |
| | ALRQLL | |
| 212 | TRCPDGQFCPVACCLDPGGASYSCCRPLLDKWPTTLSRHLGGPCQV | mature PGRN |
| | DAHCSAGHSCIFTVSGTSSCCPFPEAVACGDGHHCCPRGFHCSADG | polypeptide |
| | RSCFQRSGNNSVGAIQCPDSQFECPDFSTCCVMVDGSWGCCPMPQ | |
| | ASCCEDRVHCCPHGAFCDLVHTRCITPTGTHPLAKKLPAQRTNRAV | |
| | ALSSSVMCPDARSRCPDGSTCCELPSGKYGCCPMPNATCCSDHLHC | |
| | CPQDTVCDLIQSKCLSKENATTDLLTKPAHTVGDVKCDMEVSCP | |
| | DGYTCCRLQSGAWGCCPFTQAVCCEDHIHCCPAGFTCDTQKGTC | |
| | QGPHQVPWMEKAPAHLSLPDPQALKRDVPCDNVSSCPSSDTCCQL | |
| | TSGEWGCCPIPEAVCCSDHQHCCPQGYTCVAEGQCQRGSEIVAGLE | |
| | KMPARRASLSHPRDIGCDQHTSCPVGQTCCPSLGGSWACCQLPHA | |
| | VCCEDRQHCCPAGYTCNVKARSCEKEVVSAQPATFLARSPHVGVK | |
| | DVECGEGHFCHDNQTCCRDNRQGWACCPYRQGVCCADRRHCCPA | |
| | GFRCAARGTKCLRREAPRWDAPLRDPALRQLL | |
| 213 | DKTHTCPPCPAPELLGGPSVFLFPPKPKDTLMISRTPEVTCVVVDVS | Partial hinge-Fc |
| | HEDPEVKFNWYVDGVEVHNAKTKPREEQYNSTYRVVSVLTVLHQ | polypeptide with hole |
| | DWLNGKEYKCKVSNKALPAPIEKTISKAKGQPREPQVYTLPPSRDE | mutations-(G₄S)₂-PGRN |
| | LTKNQVSLSCAVKGFYPSDIAVEWESNGQPENNYKTTPPVLDSDGS | |
| | FFLVSKLTVDKSRWQQGNVFSCSVMHEALHNHYTQKSLSLSPGKG | |
| | GGGSGGGGSTRCPDGQFCPVACCLDPGGASYSCCRPLLDKWPTTL | |
| | SRHLGGPCQVDAHCSAGHSCIFTVSGTSSCCPFPEAVACGDGHHCC | |
| | PRGFHCSADGRSCFQRSGNNSVGAIQCPDSQFECPDFSTCCVMVDG | |
| | SWGCCPMPQASCCEDRVHCCPHGAFCDLVHTRCITPTGTHPLAKK | |
| | LPAQRTNRAVALSSSVMCPDARSRCPDGSTCCELPSGKYGCCPMPN | |
| | ATCCSDHLHCCPQDTVCDLIQSKCLSKENATTDLLTKLPAHTVGDV | |
| | KCDMEVSCPDGYTCCRLQSGAWGCCPFTQAVCCEDHIHCCPAGFT | |
| | CDTQKGTCEQGPHQVPWMEKAPAHLSLPDPQALKRDVPCDNVSSC | |
| | PSSDTCCQLTSGEWGCCPIPEAVCCSDHQHCCPQGYTCVAEGQCQR | |
| | GSEIVAGLEKMPARRASLSHPRDIGCDQHTSCPVGQTCCPSLGGSW | |
| | ACCQLPHAVCCEDRQHCCPAGYTCNVKARSCEKEVVSAQPATFLA | |
| | RSPHVGVKDVECGEGHFCHDNQTCCRDNRQGWACCPYRQGVCCA | |
| | DRRHCCPAGFRCAARGTKCLRREAPRWDAPLRDPALRQLL | |
| 214 | DKTHTCPPCPAPELLGGPSVFLFPPKPKDTLMISRTPEVTCVVVDVS | Partial hinge-Fc |
| | HEDPEVKFNWYVDGVEVHNAKTKPREEQYNSTYRVVSVLTVLHQ | polypeptide with hole |
| | DWLNGKEYKCKVSNKALPAPIEKTISKAKGQPREPQVYTLPPSRDE | mutations-G₄S-PGRN |
| | LTKNQVSLSCAVKGFYPSDIAVEWESNGQPENNYKTTPPVLDSDGS | |
| | FFLVSKLTVDKSRWQQGNVFSCSVMHEALHNHYTQKSLSLSPGKG | |
| | GGGSTRCPDGQFCPVACCLDPGGASYSCCRPLLDKWPTTLSRHLG | |
| | GPCQVDAHCSAGHSCIFTVSGTSSCCPFPEAVACGDGHHCCPRGFH | |
| | CSADGRSCFQRSGNNSVGAIQCPDSQFECPDFSTCCVMVDGSWGC | |
| | CPMPQASCCEDRVHCCPHGAFCDLVHTRCITPTGTHPLAKKLPAQR | |
| | TNRAVALSSSVMCPDARSRCPDGSTCCELPSGKYGCCPMPNATCCS | |
| | DHLHCCPQDTVCDLIQSKCLSKENATTDLLTKPAHTVGDVKCDM | |
| | EVSCPDGYTCCRLQSGAWGCCPFTQAVCCEDHIHCCPAGFTCDTQ | |
| | KGTCEQGPHQVPWMEKAPAHLSLPDPQALKRDVPCDNVSSCPSSD | |
| | TCCQLTSGEWGCCPIPEAVCCSDHQHCCPQGYTCVAEGQCQRGSEI | |
| | VAGLEKMPARRASLSHPRDIGCDQHTSCPVGQTCCPSLGGSWACC | |
| | QLPHAVCCEDRQHCCPAGYTCNVKARSCEKEVVSAQPATFLARSP | |
| | HVGVKDVECGEGHFCHDNQTCCRDNRQGWACCPYRQGVCCADR | |
| | RHCCPAGFRCAARGTKCLRREAPRWDAPLRDPALRQLL | |
| 215 | DKTHTCPPCPAPEAAGGPSVFLFPPKPKDTLMISRTPEVTCVVVDVS | Partial hinge-Fc |
| | HEDPEVKFNWYVDGVEVHNAKTKPREEQYNSTYRVVSVLTVLHQ | polypeptide with hole |
| | DWLNGKEYKCKVSNKALPAPIEKTISKAKGQPREPQVYTLPPSRDE | and LALA mutations- |
| | LTKNQVSLSCAVKGFYPSDIAVEWESNGQPENNYKTTPPVLDSDGS | (G₄S)₂-PGRN |
| | FFLVSKLTVDKSRWQQGNVFSCSVMHEALHNHYTQKSLSLSPGKG | |
| | GGGSGGGGSTRCPDGQFCPVACCLDPGGASYSCCRPLLDKWPTTL | |
| | SRHLGGPCQVDAHCSAGHSCIFTVSGTSSCCPFPEAVACGDGHHCC | |
| | PRGFHCSADGRSCFQRSGNNSVGAIQCPDSQFECPDFSTCCVMVDG | |
| | SWGCCPMPQASCCEDRVHCCPHGAFCDLVHTRCITPTGTHPLAKK | |
| | LPAQRTNRAVALSSSVMCPDARSRCPDGSTCCELPSGKYGCCPMPN | |
| | ATCCSDHLHCCPQDTVCDLIQSKCLSKENATTDLLTKPAHTVGDV | |
| | KCDMEVSCPDGYTCCRLQSGAWGCCPFTQAVCCEDHIHCCPAGFT | |
| | CDTQKGTCEQGPHQVPWMEKAPAHLSLPDPQALKRDVPCDNVSSC | |
| | PSSDTCCQLTSGEWGCCPIPEAVCCSDHQHCCPQGYTCVAEGQCQR | |
| | GSEIVAGLEKMPARRASLSHPRDIGCDQHTSCPVGQTCCPSLGGSW | |
| | ACCQLPHAVCCEDRQHCCPAGYTCNVKARSCEKEVVSAQPATFLA | |
| | RSPHVGVKDVECGEGHFCHDNQTCCRDNRQGWACCPYRQGVCCA | |
| | DRRHCCPAGFRCAARGTKCLRREAPRWDAPLRDPALRQLL | |
| 216 | DKTHTCPPCPAPEAAGGPSVFLFPPKPKDTLMISRTPEVTCVVVDVS | Partial hinge-Fc |
| | HEDPEVKFNWYVDGVEVHNAKTKPREEQYNSTYRVVSVLTVLHQ | polypeptide with hole |
| | DWLNGKEYKCKVSNKALPAPIEKTISKAKGQPREPQVYTLPPSRDE | and LALA mutations- |
| | LTKNQVSLSCAVKGFYPSDIAVEWESNGQPENNYKTTPPVLDSDGS | G₄S-PGRN |
| | FFLVSKLTVDKSRWQQGNVFSCSVMHEALHNHYTQKSLSLSPGKG | |
| | GGGSTRCPDGQFCPVACCLDPGGASYSCCRPLLDKWPTTLSRHLG | |
| | GPCQVDAHCSAGHSCIFTVSGTSSCCPFPEAVACGDGHHCCPRGFH | |
| | CSADGRSCFQRSGNNSVGAIQCPDSQFECPDFSTCCVMVDGSWGC | |
| | CPMPQASCCEDRVHCCPHGAFCDLVHTRCITPTGTHPLAKKLPAQR | |
| | TNRAVALSSSVMCPDARSRCPDGSTCCELPSGKYGCCPMPNATCCS | |
| | DHLHCCPQDTVCDLIQSKCLSKENATTDLLTKLPAHTVGDVKCDM | |
| | EVSCPDGYTCCRLQSGAWGCCPFTQAVCCEDHIHCCPAGFTCDTQ | |
| | KGTCEQGPHQVPWMEKAPAHLSLPDPQALKRDVPCDNVSSCPSSD | |
| | TCCQLTSGEWGCCPIPEAVCCSDHQHCCPQGYTCVAEGQCQRGSEI | |
| | VAGLEKMPARRASLSHPRDIGCDQHTSCPVGQTCCPSLGGSWACC | |
| | QLPHAVCCEDRQHCCPAGYTCNVKARSCEKEVVSAQPATFLARSP | |
| | HVGVKDVECGEGHFCHDNQTCCRDNRQGWACCPYRQGVCCADR | |
| | RHCCPAGFRCAARGTKCLRREAPRWDAPLRDPALRQLL | |
| 217 | DKTHTCPPCPAPEAAGGPSVFLFPPKPKDTLMISRTPEVTCVVVDVS | Partial hinge-Fc |
| | HEDPEVKFNWYVDGVEVHNAKTKPREEQYNSTYRVVSVLTVLHQ | polypeptide with hole |
| | DWLNGKEYKCKVSNKALGAPIEKTISKAKGQPREPQVYTLPPSRDE | and LALAPG mutations- |
| | LTKNQVSLSCAVKGFYPSDIAVEWESNGQPENNYKTTPPVLDSDGS | (G₄S)₂-PGRN |
| | FFLVSKLTVDKSRWQQGNVFSCSVMHEALHNHYTQKSLSLSPGKG | |
| | GGGSGGGGSTRCPDGQFCPVACCLDPGGASYSCCRPLLDKWPTTL | |
| | SRHLGGPCQVDAHCSAGHSCIFTVSGTSSCCPFPEAVACGDGHHCC | |
| | PRGFHCSADGRSCFQRSGNNSVGAIQCPDSQFECPDFSTCCVMVDG | |
| | SWGCCPMPQASCCEDRVHCCPHGAFCDLVHTRCITPTGTHPLAKK | |
| | LPAQRTNRAVALSSSVMCPDARSRCPDGSTCCELPSGKYGCCPMPN | |
| | ATCCSDHLHCCPQDTVCDLIQSKCLSKENATTDLLTKLPAHTVGDV | |
| | KCDMEVSCPDGYTCCRLQSGAWGCCPFTQAVCCEDHIHCCPAGFT | |
| | CDTQKGTCEQGPHQVPWMEKAPAHLSLPDPQALKRDVPCDNVSSC | |
| | PSSDTCCQLTSGEWGCCPIPEAVCCSDHQHCCPQGYTCVAEGQCQR | |
| | GSEIVAGLEKMPARRASLSHPRDIGCDQHTSCPVGQTCCPSLGGSW | |
| | ACCQLPHAVCCEDRQHCCPAGYTCNVKARSCEKEVVSAQPATFLA | |
| | RSPHVGVKDVECGEGHFCHDNQTCCRDNRQGWACCPYRQGVCCA | |
| | DRRHCCPAGFRCAARGTKCLRREAPRWDAPLRDPALRQLL | |
| 218 | DKTHTCPPCPAPEAAGGPSVFLFPPKPKDTLMISRTPEVTCVVVDVS | Partial hinge-Fc |
| | HEDPEVKFNWYVDGVEVHNAKTKPREEQYNSTYRVVSVLTVLHQ | polypeptide with hole |
| | DWLNGKEYKCKVSNKALGAPIEKTISKAKGQPREPQVYTLPPSRDE | and LALAPG mutations- |
| | LTKNQVSLSCAVKGFYPSDIAVEWESNGQPENNYKTTPPVLDSDGS | G₄S-PGRN |
| | FFLVSKLTVDKSRWQQGNVFSCSVMHEALHNHYTQKSLSLSPGKG | |
| | GGGSTRCPDGQFCPVACCLDPGGASYSCCRPLLDKWPTTLSRHLG | |
| | GPCQVDAHCSAGHSCIFTVSGTSSCCPFPEAVACGDGHHCCPRGFH | |
| | CSADGRSCFQRSGNNSVGAIQCPDSQFECPDFSTCCVMVDGSWGC | |
| | CPMPQASCCEDRVHCCPHGAFCDLVHTRCITPTGTHPLAKKLPAQR | |
| | TNRAVALSSSVMCPDARSRCPDGSTCCELPSGKYGCCPMPNATCCS | |
| | DHLHCCPQDTVCDLIQSKCLSKENATTDLLTKLPAHTVGDVKCDM | |
| | EVSCPDGYTCCRLQSGAWGCCPFTQAVCCEDHIHCCPAGFTCDTQ | |
| | KGTCEQGPHQVPWMEKAPAHLSLPDPQALKRDVPCDNVSSCPSSD | |
| | TCCQLTSGEWGCCPIPEAVCCSDHQHCCPQGYTCVAEGQCQRGSEI | |
| | VAGLEKMPARRASLSHPRDIGCDQHTSCPVGQTCCPSLGGSWACC | |
| | QLPHAVCCEDRQHCCPAGYTCNVKARSCEKEVVSAQPATFLARSP | |
| | HVGVKDVECGEGHFCHDNQTCCRDNRQGWACCPYRQGVCCADR | |
| | RHCCPAGFRCAARGTKCLRREAPRWDAPLRDPALRQLL | |
| 219 | DKTHTCPPCPAPELLGGPSVFLFPPKPKDTLMISRTPEVTCVVVDVS | Partial hinge-Fc |
| | HEDPEVKFNWYVDGVEVHNAKTKPREEQYNSTYRVVSVLTVLHQ | polypeptide with hole |
| | DWLNGKEYKCKVSNKALPAPIEKTISKAKGQPREPQVYTLPPSRDE | and LS mutations- |
| | LTKNQVSLSCAVKGFYPSDIAVEWESNGQPENNYKTTPPVLDSDGS | (G₄S)₂-PGRN |
| | FFLVSKLTVDKSRWQQGNVFSCSVLHEALHSHYTQKSLSLSPGKGG | |
| | GGSGGGGSTRCPDGQFCPVACCLDPGGASYSCCRPLLDKWPTTLSR | |
| | HLGGPCQVDAHCSAGHSCIFTVSGTSSCCPFPEAVACGDGHHCCPR | |
| | GFHCSADGRSCFQRSGNNSVGAIQCPDSQFECPDFSTCCVMVDGS | |
| | WGCCPMPQASCCEDRVHCCPHGAFCDLVHTRCITPTGTHPLAKKL | |
| | PAQRTNRAVALSSSVMCPDARSRCPDGSTCCELPSGKYGCCPMPN | |
| | ATCCSDHLHCCPQDTVCDLIQSKCLSKENATTDLLTKLPAHTVGDV | |
| | KCDMEVSCPDGYTCCRLQSGAWGCCPFTQAVCCEDHIHCCPAGFT | |
| | CDTQKGTCEQGPHQVPWMEKAPAHLSLPDPQALKRDVPCDNVSSC | |
| | PSSDTCCQLTSGEWGCCPIPEAVCCSDHQHCCPQGYTCVAEGQCQR | |
| | GSEIVAGLEKMPARRASLSHPRDIGCDQHTSCPVGQTCCPSLGGSW | |
| | ACCQLPHAVCCEDRQHCCPAGYTCNVKARSCEKEVVSAQPATFLA | |
| | RSPHVGVKDVECGEGHFCHDNQTCCRDNRQGWACCPYRQGVCCA | |
| | DRRHCCPAGFRCAARGTKCLRREAPRWDAPLRDPALRQLL | |
| 220 | DKTHTCPPCPAPELLGGPSVFLFPPKPKDTLMISRTPEVTCVVVDVS | Partial hinge-Fc |
| | HEDPEVKFNWYVDGVEVHNAKTKPREEQYNSTYRVVSVLTVLHQ | polypeptide with hole |
| | DWLNGKEYKCKVSNKALPAPIEKTISKAKGQPREPQVYTLPPSRDE | and LS mutations-G₄S- |
| | LTKNQVSLSCAVKGFYPSDIAVEWESNGQPENNYKTTPPVLDSDGS | PGRN |
| | FFLVSKLTVDKSRWQQGNVFSCSVLHEALHSHYTQKSLSLSPGKGG | |
| | GGSTRCPDGQFCPVACCLDPGGASYSCCRPLLDKWPTTLSRHLGGP | |
| | CQVDAHCSAGHSCIFTVSGTSSCCPFPEAVACGDGHHCCPRGFHCS | |
| | ADGRSCFQRSGNNSVGAIQCPDSQFECPDFSTCCVMVDGSWGCCP | |
| | MPQASCCEDRHCCPHGAFCDLVHTRCITPTGTHPLAKKLPAQRTN | |
| | RAVALSSSVMCPDARSRCPDGSTCCELPSGKYGCCPMPNATCCSD | |
| | HLHCCPQDTVCDLIQSKCLSKENATTDLLTKLPAHTVGDVKCDME | |
| | VSCPDGYTCCRLQSGAWGCCPFTQAVCCEDHIHCCPAGFTCDTQK | |
| | GTCEQGPHQVPWMEKAPAHLSLPDPQALKRDVPCDNVSSCPSSDT | |
| | CCQLTSGEWGCCPIPEAVCCSDHQHCCPQGYTCVAEGQCQRGSEIV | |
| | AGLEKMPARRASLSHPRDIGCDQHTSCPVGQTCCPSLGGSWACCQ | |
| | LPHAVCCEDRQHCCPAGYTCNVKARSCEKEVVSAQPATFLARSPH | |
| | VGVKDVECGEGHFCHDNQTCCRDNRQGWACCPYRQGVCCADRR | |
| | HCCPAGFRCAARGTKCLRREAPRWDAPLRDPALRQLL | |
| 221 | DKTHTCPPCPAPEAAGGPSVFLFPPKPKDTLMISRTPEVTCVVVDVS | Partial hinge-Fc |
| | HEDPEVKFNWYVDGVEVHNAKTKPREEQYNSTRVVSVLTVLHQ | polypeptide with hole |
| | DWLNGKEYKCKVSNKALPAPIEKTISKAKGQPREPQVYTLPPSRDE | LALA, and LS |
| | LTKNQVSLSLCAVKGFYPSDIAVEWESNGQPENNYKTTPPVLDSDGS | mutations-(G₄S)₂-PGRN |
| | FFLVSKLTVDKSRWQQGNVFSCSVLHEALHSHYTQKSLSLSPGKGG | |
| | GGSGGGGSTRCPDGQFCPVACCLDPGGASYSCCRPLLDKWPTTLSR | |
| | HLGGPCQVDAHCSAGHSCIFTVSGTSSCCPFPEAVACGDGHHCCPR | |
| | GFHCSADGRSCFQRSGNNSVGAIQCPDSQFECPDFSTCCVMVDGS | |
| | WGCCPMPQASCCEDRVHCCPHGAFCDLVHTRCITPTGTHPLAKKL | |
| | PAQRTNRAVALSSSVMCPDARSRCPDGSTCCELPSGKYGCCPMPN | |
| | ATCCSDHLHCCPQDTVCDLIQSKCLSKENATTDLLTKLPAHTVGDV | |
| | KCDMEVSCPDGYTCCRLQSGAWGCCPFTQAVCCEDHIHCCPAGFT | |
| | CDTQKGTCEQGPHQVPWMEKAPAHLSLPDPQALKRDVPCDNVSSC | |
| | PSSDTCCQLTSGEWGCCPIPEAVCCSDHQHCCPGQGYTCVAEGQCQR | |
| | GSEIVAGLEKMPARRASLSHPRDIGCDQHTSCPVGQTCCPSLGGSW | |
| | ACCQLPHAVCCEDRQHCCPAGYTCNVKARSCEKEVVSAQPATFLA | |
| | RSPHVGVKDVECGEGHFCHDNQTCCRDNRQGWACCPYRQGVCCA | |
| | DRRHCCPAGFRCAARGTKCLRREAPRWDAPLRDPALRQLL | |
| 222 | DKTHTCPPCPAPEAAGGPSVFLFPPKPKDTLMISRTPEVTCVVVDVS | Partial hinge-Fc |
| | HEDPEVKFNWYVDGVEVHNAKTKPREEQYNSTYRVVSVLTVLHQ | polypeptide with hole, |
| | DWLNGKEYKCKVSNKALPAPIEKTISKAKGQPREPQVYTLPPSRDE | LALA, and LS |
| | LTKNQVSLSCAVKGFYPSDIAVEWESNGQPENNYKTTPPVLDSDGS | mutations-G₄S-PGRN |
| | FFLVSKLTVDKSRWQQGNVFSCSVLHEALHSHYTQKSLSLSPGKGG | |
| | GGSTRCPDGQFCPVACCLDPGGASYSCCRPLLDKWPTTLSRHLGGP | |
| | CQVDAHCSAGHSCIFTVSGTSSCCPFPEAVACGDGHHCCPRGFHCS | |
| | ADGRSCFQRSGNNSVGAIQCPDSQFECPDFSTCCVMVDGSWGCCP | |
| | MPQASCCEDRVHCCPHGAFCDLVHTRCITPTGTHPLAKKLPAQRTN | |
| | RAVALSSSVMCPDARSRCPDGSTCCELPSGKYGCCPMPNATCCSD | |
| | HLHCCPQDTVCDLIQSKCLSKENATTDLLTKLPAHTVGDVKCDME | |
| | VSCPDGYTCCRLQSGAWGCCPFTQAVCCEDHIHCCPAGFTCDTQK | |
| | GTCEQGPHQVPWMEKAPAHLSLPDPQALKRDVPCDNVSSCPSSDT | |
| | CCQLTSGEWGCCPIPEAVCCSDHQHCCPQGYTCVAEGQCQRGSEIV | |
| | AGLEKMPARRASLSHPRDIGCDQHTSCPVGQTCCPSLGGSWACCQ | |
| | LPHAVCCEDRQHCCPAGYTCNVKARSCEKEVVSAQPATFLARSPH | |
| | VGVKDVECGEGHFCHDNQTCCRDNRQGWACCPYRQGVCCADRR | |
| | HCCPAGFRCAARGTKCLRREAPRWDAPLRDPALRQLL | |
| 223 | DKTHTCPPCPAPEAAGGPSVFLFPPKPKDTLMISRTPEVTCVVVDVS | Partial hinge-Fc |
| | HEDPEVKFNWYVDGVEVHNAKTKPREEQYNSTYRVVSVLTVLHQ | polypeptide with hole, |
| | DWLNGKEYKCKVSNKALGAPIEKTISKAKGQPREPQVYTLPPSRDE | LALAPG, and LS |
| | LTKNQVSLSCAVKGFYPSDIAVEWESNGQPENNYKTTPPVLDSDGS | mutations-(G₄S)₂-PGRN |
| | FFLVSKLTVDKSRWQQGNVFSCSVLHEALHSHYTQKSLSLSPGKGG | |
| | GGSGGGGSTRCPDGQFCPVACCLDPGGASYSCCRPLLDKWPTTLSR | |
| | HLGGPCQVDAHCSAGHSCIFTVSGTSSCCPFPEAVACGDGHHCCPR | |
| | GFHCSADGRSCFQRSGNNSVGAIQCPDSQFECPDFSTCCVMVDGS | |
| | WGCCPMPQASCCEDRVHCCPHGAFCDLVHTRCITPTGTHPLAKKL | |
| | PAQRTNRAVALSSSVMCPDARSRCPDGSTCCELPSGKYGCCPMPN | |
| | ATCCSDHLHCCPQDTVCDLIQSKCLSKENATTDLLTKLPAHTVGDV | |
| | KCDMEVSCPDGYTCCRLQSGAWGCCPFTQAVCCEDHIHCCPAGFT | |
| | CDTQKGTCEQGPHQVPWMEKAPAHLSLPDPQALKRDVPCDNVSSC | |
| | PSSDTCCQLTSGEWGCCPIPEAVCCSDHQHCCPQGYTCVAEGQCQR | |
| | GSEIVAGLEKMPARRASLSHPRDIGCDQHTSCPVGQTCCPSLGGSW | |
| | ACCQLPHAVCCEDRQHCCPAGYTCNVKARSCEKEVVSAQPATFLA | |
| | RSPHVGVKDVECGEGHFCHDNQTCCRDNRQGWACCPYRQGVCCA | |
| | DRRHCCPAGFRCAARGTKCLRREAPRWDAPLRDPALRQLL | |
| 224 | DKTHTCPPCPAPEAAGGPSVFLFPPKPKDTLMISRTPEVTCVVVDVS | Partial hinge-Fc |
| | HEDPEVKFNWYVDGVEVHNAKTKPREEQYNSTYRVVSVLTVLHQ | polypeptide with hole, |
| | DWLNGKEYKCKVSNKALGAPIEKTISKAKGQPREPQVYTLPPSRDE | LALAPG, and LS |
| | LTKNQVSLSCAVKGFYPSDIAVEWESNGQPENNYKTTPPVLDSDGS | mutations-G₄S-PGRN |
| | FFLVSKLTVDKSRWQQGNVFSCSVLHEALHSHYTQKSLSLSPGKGG | |
| | GGSTRCPDGQFCPVACCLDPGGASYSCCRPLLDKWPTTLSRHLGGP | |
| | CQVDAHCSAGHSCIFTVSGTSSCCPFPEAVACGDGHHCCPRGFHCS | |
| | ADGRSCFQRSGNNSVGAIQCPDSQFECPDFSTCCVMVDGSWGCCP | |
| | MPQASCCEDRVHCCPHGAFCDLVHTRCITPTGTHPLAKKLPAQRTN | |
| | RAVALSSSVMCPDARSRCPDGSTCCELPSGKYGCCPMPNATCCSD | |
| | HLHCCPQDTVCDLIQSKCLSKENATTDLLTKLPAHTVGDVKCDME | |
| | VSCPDGYTCCRLQSGAWGCCPFTQAVCCEDHIHCCPAGFTCDTQK | |
| | GTCEQGPHQVPWMEKAPAHLSLPDPQALKRDVPCDNVSSCPSSDT | |
| | CCQLTSGEWGCCPIPEAVCCSDHQHCCPQGYTCVAEGQCQRGSEIV | |
| | AGLEKMPARRASLSHPRDIGCDQHTSCPVGQTCCPSLGGSWACCQ | |
| | LPHAVCCEDRQHCCPAGYTCNVKARSCEKEVVSAQPATFLARSPH | |
| | VGVKDVECGEGHFCHDNQTCCRDNRQGWACCPYRQGVCCADRR | |
| | HCCPAGFRCAARGTKCLRREAPRWDAPLRDPALRQLL | |
| 225 | TRCPDGQFCPVACCLDPGGASYSCCRPLLDKWPTTLSRHLGGPCQV | PGRN-(G₄S)₂-Partial |
| | DAHCSAGHSCIFTVSGTSSCCPFPEAVACGDGHHCCPRGFHCSADG | hinge-Fc polypeptide |
| | RSCFQRSGNNSVGAIQCPDSQFECPDFSTCCVMVDGSWGCCPMPQ | with hole mutations |
| | ASCCEDRVHCCPHGAFCDLVHTRCITPTGTHPLAKKLPAQRTNRAV | |
| | ALSSSVMCPDARSRCPDGSTCCELPSGKYGCCPMPNATCCSDHLHC | |
| | CPQDTVCDLIQSKCLSKENATTDLLTKLPAHTVGDVKCDMEVSCP | |
| | DGYTCCRLQSGAWGCCPFTQAVCCEDHIHCCPAGFTCDTQKGTCE | |
| | QGPHQVPWMEKAPAHLSLPDPQALKRDVPCDNVSSCPSSDTCCQL | |
| | TSGEWGCCPIPEAVCCSDHQHCCPQGYTCVAEGQCQRGSEIVAGLE | |
| | KMPARRASLSHPRDIGCDQHTSCPVGQTCCPSLGGSWACCQLPHA | |
| | VCCEDRQHCCPAGYTCNVKARSCEKEVVSAQPATFLARSPHVGVK | |
| | DVECGEGHFCHDNQTCCRDNRQGWACCPYRQGVCCADRRHCCPA | |
| | GFRCAARGTKCLRREAPRWDAPLRDPALRQLLGGGGSGGGGSDKT | |
| | HTCPPCPAPELLGGPSVFLFPPKPKDTLMISRTPEVTCVVVDVSHED | |
| | PEVKFNWYVDGVEVHNAKTKPREEQYNSTYRVVSVLTVLHQDWL | |
| | NGKEYKCKVSNKALPAPIEKTISKAKGQPREPQVYTLPPSRDELTK | |
| | NQVSLSCAVKGFYPSDIAVEWESNGQPENNYKTTPPVLDSDGSFFL | |
| | VSKLTVDKSRWQQGNVFSCSVMHEALHNHYTQKSLSLSPGK | |
| 226 | TRCPDGQFCPVACCLDPGGASYSCCRPLLDKWPTTLSRHLGGPCQV | PGRN-G₄S-Partial |
| | DAHCSAGHSCIFTVSGTSSCCPFPEAVACGDGHHCCPRGFHCSADG | hinge-Fc polypeptide |
| | RSCFQRSGNNSVGAIQCPDSQFECPDFSTCCVMVDGSWGCCPMPQ | with hole mutations |
| | ASCCEDRVHCCPHGAFCDLVHTRCITPTGTHPLAKKLPAQRTNRAV | |
| | ALSSSVMCPDARSRCPDGSTCCELPSGKYGCCPMPNATCCSDHLHC | |
| | CPQDTVCDLIQSKCLSKENATTDLLTKLPAHTVGDVKCDMEVSCP | |
| | DGYTCCRLQSGAWGCCPFTQAVCCEDHIHCCPAGFTCDTQKGTCE | |
| | QGPHQVPWMEKAPAHLSLPDPQALKRDVPCDNVSSCPSSDTCCQL | |
| | TSGEWGCCPIPEAVCCSDHQHCCPQGYTCVAEGQCQRGSEIVAGLE | |
| | KMPARRASLSHPRDIGCDQHTSCPVGQTCCPSLGGSWACCQLPHA | |
| | VCCEDRQHCCPAGYTCNVKARSCEKEVVSAQPATFLARSPHVGVK | |
| | DVECGEGHFCHDNQTCCRDNRQGWACCPYRQGVCCADRRHCCPA | |
| | GFRCAARGTKCLRREAPRWDAPLRDPALRQLLGGGGSDKTHTCPP | |
| | CPAPELLGGPSVFLFPPKPKDTLMISRTPEVTCVVVDVSHEDPEVKF | |
| | NWYVDGVEVHNAKTKPREEQYNSTYRVVSVLTVLHQDWLNGKE | |
| | YKCKVSNKALPAPIEKTISKAKGQPREPQVYTLPPSRDELTKNQVSL | |
| | SCAVKGFYPSDIAVEWESNGQPENNYKTTPPVLDSDGSFFLVSKLT | |
| | VDKSRWQQGNVFSCSVMHEALHNHYTQKSLSLSPGK | |
| 227 | TRCPDGQFCPVACCLDPGGASYSCCRPLLDKWPTTLSRHLGGPCQV | PGRN-(G₄S)₂-Partial |
| | DAHCSAGHSCIFTVSGTSSCCPFPEAVACGDGHHCCPRGFHCSADG | hinge-Fc polypeptide |
| | RSCFQRSGNNSVGAIQCPDSQFECPDFSTCCVMVDGSWGCCPMPQ | with hole and LALA |
| | ASCCEDRVHCCPHGAFCDLVHTRCITPTGTHPLAKKLPAQRTNRAV | mutations |
| | ALSSSVMCPDARSRCPDGSTCCELPSGKYGCCPMPNATCCSDHLHC | |
| | CPQDTVCDLIQSKCLSKENATTDLLTKLPAHTVGDVKCDMEVSCP | |
| | DGYTCCRLQSGAWGCCPFTQAVCCEDHIHCCPAGFTCDTQKGTCE | |
| | QGPHQVPWMEKAPAHLSLPDPQALKRDVPCDNVSSCPSSDTCCQL | |
| | TSGEWGCCPIPEAVCCSDHQHCCPQGYTCVAEGQCQRGSEIVAGLE | |
| | KMPARRASLSHPRDIGCDQHTSCPVGQTCCPSLGGSWACCQLPHA | |
| | VCCEDRQHCCPAGYTCNVKARSCEKEVVSAQPATFLARSPHVGVK | |
| | DVECGEGHFCHDNQTCCRDNRQGWACCPYRQGVCCADRRHCCPA | |
| | GFRCAARGTKCLRREAPRWDAPLRDPALRQLLGGGGSGGGGSDKT | |
| | HTCPPCPAPEAAGGPSVFLFPPKPKDTLMISRTPEVTCVVVDVSHED | |
| | PEVKFNWYVDGVEVHNAKTKPREEQYNSTYRVVSVLTVLHQDWL | |
| | NGKEYKCKVSNKALPAPIEKTISKAKGQPREPQVYTLPPSRDELTK | |
| | NQVSLSCAVKGFYPSDIAVEWESNGQPENNYKTTPPVLDSDGSFFL | |
| | VSKLTVDKSRWQQGNVFSCSVMHEALHNHYTQKSLSLSPGK | |
| 228 | TRCPDGQFCPVACCLDPGGASYSCCRPLLDKWPTTLSRHLGGPCQV | PGRN-G₄S-Partial |
| | DAHCSAGHSCIFTVSGTSSCCPFPEAVACGDGHHCCPRGFHCSADG | hinge-Fc polypeptide |
| | RSCFQRSGNNSVGAIQCPDSQFECPDFSTCCVMVDGSWGCCPMPQ | with hole and LALA |
| | ASCCEDRVHCCPHGAFCDLVHTRCITPTGTHPLAKKLPAQRTNRAV | mutations |
| | ALSSSVMCPDARSRCPDGSTCCELPSGKYGCCPMPNATCCSDHLHC | |
| | CPQDTVCDLIQSKCLSKENATTDLLTKLPAHTVGDVKCDMEVSCP | |
| | DGYTCCRLQSGAWGCCPFTQAVCCEDHIHCCPAGFTCDTQKGTCE | |
| | QGPHQVPWMEKAPAHLSLPDPQALKRDVPCDNVSSCPSSDTCCQL | |
| | TSGEWGCCPIPEAVCCSDHQHCCPQGYTCVAEGQCQRGSEIVAGLE | |
| | KMPARRASLSHPRDIGCDQHTSCPVGQTCCPSLGGSWACCQLPHA | |
| | VCCEDRQHCCPAGYTCNVKARSCEKEVVSAQPATFLARSPHVGVK | |
| | DVECGEGHFCHDNQTCCRDNRQGWACCPYRQGVCCADRRHCCPA | |
| | GFRCAARGTKCLRREAPRWDAPLRDPALRQLLGGGGSDKTHTCPP | |
| | CPAPEAAGGPSVFLFPPKPKDTLMISRTPEVTCVVVDVSHEDPEVKF | |
| | NWYVDGVEVHNAKTKPREEQYNSTYRVVSVLTVLHQDWLNGKE | |
| | YKCKVSNKALPAPIEKTISKAKGQPREPQVYTLPPSRDELTKNQVSL | |
| | SCAVKGFYPSDIAVEWESNGQPENNYKTTPPVLDSDGSFFLVSKLT | |
| | VDKSRWQQGNVFSCSVMHEALHNHYTQKSLSLSPGK | |
| 229 | TRCPDGQFCPVACCLDPGGASYSCCRPLLDKWPTTLSRHLGGPCQV | PGRN-(G₄S)₂-Partial |
| | DAHCSAGHSCIFTVSGTSSCCPFPEAVACGDGHHCCPRGFHCSADG | hinge-Fc polypeptide |
| | RSCFQRSGNNSVGAIQCPDSQFECPDFSTCCVMVDGSWGCCPMPQ | with hole and LALAPG |
| | ASCCEDRVHCCPHGAFCDLVHTRCITPTGTHPLAKKLPAQRTNRAV | mutations |
| | ALSSSVMCPDARSRCPDGSTCCELPSGKYGCCPMPNATCCSDHLHC | |
| | CPQDTVCDLIQSKCLSKENATTDLLTKLPAHTVGDVKCDMEVSCP | |
| | DGYTCCRLQSGAWGCCPFTQAVCCEDHIHCCPAGFTCDTQKGTCE | |
| | QGPHQVPWMEKAPAHLSLPDPQALKRDVPCDNVSSCPSSDTCCQL | |
| | TSGEWGCCPIPEAVCCSDHQHCCPQGYTCVAEGQCQRGSEIVAGLE | |
| | KMPARRASLSHPRDIGCDQHTSCPVGQTCCPSLGGSWACCQLPHA | |
| | VCCEDRQHCCPAGYTCNVKARSCEKEVVSAQPATFLARSPHVGVK | |
| | DVECGEGHFCHDNQTCCRDNRQGWACCPYRQGVCCADRRHCCPA | |
| | GFRCAARGTKCLRREAPRWDAPLRDPALRQLLGGGGSGGGGSDKT | |
| | HTCPPCPAPEAAGGPSVFLFPPKPKDTLMISRTPEVTCVVVDVSHED | |
| | PEVKFNWYVDGVEVHNAKTKPREEQYNSTYRVVSVLTVLHQDWL | |
| | NGKEYKCKVSNKALGAPIEKTISKAKGQPREPQVYTLPPSRDELTK | |
| | NQVSLSCAVKGFYPSDIAVEWESNGQPENNYKTTPPVLDSDGSFFL | |
| | VSKLTVDKSRWQQGNVFSCSVMEALHNHYTQKSLSLSPGK | |
| 230 | TRCPDGQFCPVACCLDPGGASYSCCRPLLDKWPTTLSRHLGGPCQV | PGRN-G₄S-Partial |
| | DAHCSAGHSCIFTVSGTSSCCPFPEAVACGDGHHCCPRGFHCSADG | hinge-Fc polypeptide |
| | RSCFQRSGNNSVGAIQCPDSQFECPDFSTCCVMVDGSWGCCPMPQ | with hole and LALAPG |
| | ASCCEDRVHCCPHGAFCDLVHTRCITPTGTHPLAKKLPAQRTNRAV | mutations |
| | ALSSSVMCPDARSRCPDGSTCCELPSGKYGCCPMPNATCCSDHLHC | |
| | CPQDTVCDLIQSKCLSKENATTDLLTKLPAHTVGDVKCDMEVSCP | |
| | DGYTCCRLQSGAWGCCPFTQAVCCEDHIHCCPAGFTCDTQKGTCE | |
| | QGPHQVPWMEKAPAHLSLPDPQALKRDVPCDNVSSCPSSDTCCQL | |
| | TSGEWGCCPIPEAVCCSDHQHCCPQGYTCVAEGQCQRGSEIVAGLE | |
| | KMPARRASLSHPRDIGCDQHTSCPVGQTCCPSLGGSWACCQLPHA | |
| | VCCEDRQHCCPAGYTCNVKARSCEKEVVSAQPATFLARSPHVGVK | |
| | DVECGEGHFCHDNQTCCRDNRQGWACCPYRQGVCCADRRHCCPA | |
| | GFRCAARGTKCLRREAPRWDAPLRDPALRQLLGGGGSDKTHTCPP | |
| | CPAPEAAGGPSVFLFPPKPKDTLMISRTPEVTCVVVDVSHEDPEVKF | |
| | NWYVDGVEVHNAKTKPREEQYNSTYRVVSVLTVLHQDWLNGKE | |
| | YKCKVSNKALGAPIEKTISKAKGQPREPQVYTLPPSRDELTKNQVS | |
| | LSCAVKGFYPSDIAVEWESNGQPENNYKTTPPVLDSDGSFFLVSKL | |
| | TVDKSRWQQGNVFSCSVMHEALHNHYTQKSLSLSPGK | |
| 231 | TRCPDGQFCPVACCLDPGGASYSCCRPLLDKWPTTLSRHLGGPCQV | PGRN-(G₄S)₂-Partial |
| | DAHCSAGHSCIFTVSGTSSCCPFPEAVACGDGHHCCPRGFHCSADG | hinge-Fc polypeptide |
| | RSCFQRSGNNSVGAIQCPDSQFECPDFSTCCVMVDGSWGCCPMPQ | with hole and LS |
| | ASCCEDRVHCCPHGAFCDLVHTRCITPTGTHPLAKKLPAQRTNRAV | mutations |
| | ALSSSVMCPDARSRCPDGSTCCELPSGKYGCCPMPNATCCSDHLHC | |
| | CPQDTVCDLIQSKCLSKENATTDLLTKLPAHTVGDVKCDMEVSCP | |
| | DGYTCCRLQSGAWGCCPFTQAVCCEDHIHCCPAGFTCDTQKGTCE | |
| | QGPHQVPWMEKAPAHLSLPDPQALKRDVPCDNVSSCPSSDTCCQL | |
| | TSGEWGCCPIPEAVCCSDHQHCCPQGYTCVAEGQCQRGSEIVAGLE | |
| | KMPARRASLSHPRDIGCDQHTSCPVGQTCCPSLGGSWACCQLPHA | |
| | VCCEDRQHCCPAGYTCNVKARSCEKEVVSAQPATFLARSPHVGVK | |
| | DVECGEGHFCHDNQTCCRDNRQGWACCPYRQGVCCADRRHCCPA | |
| | GFRCAARGTKCLRREAPRWDAPLRDPALRQLLGGGGSGGGGSDKT | |
| | HTCPPCPAPELLGGPSVFLFPPKPKDTLMISRTPEVTCVVVDVSHED | |
| | PEVKFNWYVDGVEVHNAKTKPREEQYNSTYRVVSVLTVLHQDWL | |
| | NGKEYKCKVSNKALPAPIEKTISKAKGQPREPQVYTLPPSRDELTK | |
| | NQVSLSCAVKGFYPSDIAVEWESNGQPENNYKTTPPVLDSDGSFFL | |
| | VSKLTVDKSRWQQGNVFSCSVLHEALHSHYTQKSLSLSPGK | |
| 232 | TRCPDGQFCPVACCLDPGGASYSCCRPLLDKWPTTLSRHLGGPCQV | PGRN-G₄S-Partial |
| | DAHCSAGHSCIFTVSGTSSCCPFPEAVACGDGHHCCPRGFHCSADG | hinge-Fc polypeptide |
| | RSCFQRSGNNSVGAIQCPDSQFECPDFSTCCVMVDGSWGCCPMPQ | with hole and LS |
| | ASCCEDRVHCCPHGAFCDLVHTRCITPTGTHPLAKKLPAQRTNRAV | mutations |
| | ALSSSVMCPDARSRCPDGSTCCELPSGKYGCCPMPNATCCSDHLHC | |
| | CPQDTVCDLIQSKCLSKENATTDLLTKLPAHTVGDVKCDMEVSCP | |
| | DGYTCCRLQSGAWGCCPFTQAVCCEDHIHCCPAGFTCDTQKGTCE | |
| | QGPHQVPWMEKAPAHLSLPDPQALKRDVPCDNVSSCPSSDTCCQL | |
| | TSGEWGCCPIPEAVCCSDHQHCCPQGYTCVAEGQCQRGSEIVAGLE | |
| | KMPARRASLSHPRDIGCDQHTSCPVGQTCCPSLGGSWACCQLPHA | |
| | VCCEDRQHCCPAGYTCNVKARSCEKEVVSAQPATFLARSPHVGVK | |
| | DVECGEGHFCHDNQTCCRDNRQGWACCPYRQGVCCADRRHCCPA | |
| | GFRCAARGTKCLRREAPRWDAPLRDPALRQLLGGGGSDKTHTCPP | |
| | CPAPELLGGPSVFLFPPKPKDTLMISRTPEVTCVVVDVSHEDPEVKF | |
| | NWYVDGVEVHNAKTKPREEQYNSTYRVVSVLTVLHQDWLNGKE | |
| | YKCKVSNKALPAPIEKTISKAKGQPREPQVYTLPPSRDELTKNQVSL | |
| | SCAVKGFYPSDIAVEWESNGQPENNYKTTPPVLDSDGSFFLVSKLT | |
| | VDKSRWQQGNVFSCSVLHEALHSHYTQKSLSLSPGK | |
| 233 | TRCPDGQFCPVACCLDPGGASYSCCRPLLDKWPTTLSRHLGGPCQV | PGRN-(G₄S)₂-Partial |
| | DAHCSAGHSCIFTVSGTSSCCPFPEAVACGDGHHCCPRGFHCSADG | hinge-Fc polypeptide |
| | RSCFQRSGNNSVGAIQCPDSQFECPDFSTCCVMVDGSWGCCPMPQ | with hole, LALA, and |
| | ASCCEDRVHCCPHGAFCDLVHTRCITPTGTHPLAKKLPAQRTNRAV | LS mutations |
| | ALSSSVMCPDARSRCPDGSTCCELPSGKYGCCPMPNATCCSDHLHC | |
| | CPQDTVCDLIQSKCLSKENATTDLLTKLPAHTVGDVKCDMEVSCP | |
| | DGYTCCRLQSGAWGCCPFTQAVCCEDHIHCCPAGFTCDTQKGTCE | |
| | QGPHQVPWMEKAPAHLSLPDPQALKRDVPCDNVSSCPSSDTCCQL | |
| | TSGEWGCCPIPEAVCCSDHQHCCPQGYTCVAEGQCQRGSEIVAGLE | |
| | KMPARRASLSHPRDIGCDQHTSCPVGQTCCPSLGGSWACCQLPHA | |
| | VCCEDRQHCCPAGYTCNVKARSCEKEVVSAQPATFLARSPHVGVK | |
| | DVECGEGHFCHDNQTCCRDNRQGWACCPYRQGVCCADRRHCCPA | |
| | GFRCAARGTKCLRREAPRWDAPLRDPALRQLLGGGGSGGGGSDKT | |
| | HTCPPCPAPEAAGGPSVFLFPPKPKDTLMISRTPEVTCVVVDVSHED | |
| | PEVKFNWYVDGVEVHNAKTKPREEQYNSTYRVVSVLTVLHQDWL | |
| | NGKEYKCKVSNKALPAPIEKTISKAKGQPREPQVYTLPPSRDELTK | |
| | NQVSLSCAVKGFYPSDIAVEWESNGQPENNYKTTPPVLDSDGSFFL | |
| | VSKLTVDKSRWQQGNVFSCSVLHEALHSHYTQKSLSLSPGK | |
| 234 | TRCPDGQFCPVACCLDPGGASYSCCRPLLDKWPTTLSRHLGGPCQV | PGRN-G₄S-Partial |
| | DAHCSAGHSCIFTVSGTSSCCPFPEAVACGDGHHCCPRGFHCSADG | hinge-Fc polypeptide |
| | RSCFQRSGNNSVGAIQCPDSQFECPDFSTCCVMVDGSWGCCPMPQ | with hole, LALA, and |
| | ASCCEDRVHCCPHGAFCDLVHTRCITPTGTHPLAKKLPAQRTNRAV | LS mutations |
| | ALSSSVMCPDARSRCPDGSTCCELPSGKYGCCPMPNATCCSDHLHC | |
| | CPQDTVCDLIQSKCLSKENATTDLLTKLPAHTVGDVKCDMEVSCP | |
| | DGYTCCRLQSGAWGCCPFTQAVCCEDHIHCCPAGFTCDTQKGTCE | |
| | QGPHQVPWMEKAPAHLSLPDPQALKRDVPCDNVSSCPSSDTCCQL | |
| | TSGEWGCCPIPEAVCCSDHQHCCPQGYTCVAEGQCQRGSEIVAGLE | |
| | KMPARRASLSHPRDIGCDQHTSCPVGQTCCPSLGGSWACCQLPHA | |
| | VCCEDRQHCCPAGYTCNVKARSCEKEVVSAQPATFLARSPHVGVK | |
| | DVECGEGHFCHDNQTCCRDNRQGWACCPYRQGVCCADRRHCCPA | |
| | GFRCAARGTKCLRREAPRWDAPLRDPALRQLLGGGGSDKTHTCPP | |
| | CPAPEAAGGPSVFLFPPKPKDTLMISRTPEVTCVVVDVSHEDPEVKF | |
| | NWYVDGVEVHNAKTKPREEQYNSTYRVVSVLTVLHQDWLNGKE | |
| | YKCKVSNKALPAPIEKTISKAKGQPREPQVYTLPPSRDELTKNQVSL | |
| | SCAVKGFYPSDIAVEWESNGQPENNYKTTPPVLDSDGSFFLVSKLT | |
| | VDKSRWQQGNVFSCSVLHEALHSHYTQKSLSLSPGK | |
| 235 | TRCPDGQFCPVACCLDPGGASYSCCRPLLDKWPTTLSRHLGGPCQV | PGRN-(G₄S)₂-Partial |
| | DAHCSAGHSCIFTVSGTSSCCPFPEAVACGDGHHCCPRGFHCSADG | hinge-Fc polypeptide |
| | RSCFQRSGNNSVGAIQCPDSQFECPDFSTCCVMVDGSWGCCPMPQ | with hole, LALAPG, and |
| | ASCCEDRVHCCPHGAFCDLVHTRCITPTGTHPLAKKLPAQRTNRAV | LS mutations |
| | ALSSSVMCPDARSRCPDGSTCCELPSGKYGCCPMPNATCCSDHLHC | |
| | CPQDTVCDLIQSKCLSKENATTDLLTKLPAHTVGDVKCDMEVSCP | |
| | DGYTCCRLQSGAWGCCPFTQAVCCEDHIHCCPAGFTCDTQKGTCE | |
| | QGPHQVPWMEKAPAHLSLPDPQALKRDVPCDNVSSCPSSDTCCQL | |
| | TSGEWGCCPIPEAVCCSDHQHCCPQGYTCVAEGQCQRGSEIVAGLE | |
| | KMPARRASLSHPRDIGCDQHTSCPVGQTCCPSLGGSWACCQLPHA | |
| | VCCEDRQHCCPAGYTCNVKARSCEKEVVSAQPATFLARSPHVGVK | |
| | DVECGEGHFCHDNQTCCRDNRQGWACCPYRQGVCCADRRHCCPA | |
| | GFRCAARGTKCLRREAPRWDAPLRDPALRQLLGGGGSGGGGSDKT | |
| | HTCPPCPAPEAAGGPSVFLFPPKPKDTLMISRTPEVTCVVVDVSHED | |
| | PEVKFNWYVDGVEVHNAKTKPREEQYNSTYRVVSVLTVLHQDWL | |
| | NGKEYKCKVSNKALGAPIEKTISKAKGQPREPQVYTLPPSRDELTK | |
| | NQVSLSCAVKGFYPSDIAVEWESNGQPENNYKTTPPVLDSDGSFFL | |
| | VSKLTVDKSRWQQGNVFSCSVLHEALHSHYTQKSLSLSPGK | |
| 236 | TRCPDGQFCPVACCLDPGGASYSCCRPLLDKWPTTLSRHLGGPCQV | PGRN-G₄S-Partial |
| | DAHCSAGHSCIFTVSGTSSCCPFPEAVACGDGHHCCPRGFHCSADG | hinge-Fc polypeptide |
| | RSCFQRSGNNSVGAIQCPDSQFECPDFSTCCVMVDGSWGCCPMPQ | with hole, LALAPG, and |
| | ASCCEDRVHCCPHGAFCDLVHTRCITPTGTHPLAKKLPAQRTNRAV | LS mutations |
| | ALSSSVMCPDARSRCPDGSTCCELPSGKYGCCPMPNATCCSDHLHC | |
| | CPQDTVCDLIQSKCLSKENATTDLLTKLPAHTVGDVKCDMEVSCP | |
| | DGYTCCRLQSGAWGCCPFTQAVCCEDHIHCCPAGFTCDTQKGTCE | |
| | QGPHQVPWMEKAPAHLSLPDPQALKRDVPCDNVSSCPSSDTCCQL | |
| | TSGEWGCCPIPEAVCCSDHQHCCPQGYTCVAEGQCQRGSEIVAGLE | |
| | KMPARRASLSHPRDIGCDQHTSCPVGQTCCPSLGGSWACCQLPHA | |
| | VCCEDRQHCCPAGYTCNVKARSCEKEVVSAQPATFLARSPHVGVK | |
| | DVECGEGHFCHDNQTCCRDNRQGWACCPYRQGVCCADRRHCCPA | |
| | GFRCAARGTKCLRREAPRWDAPLRDPALRQLLGGGGSDKTHTCPP | |
| | CPAPEAAGGPSVFLFPPKPKDTLMISRTPEVTCVVVDVSHEDPEVKF | |
| | NWYVDGVEVHNAKTKPREEQYNSTYRVVSVLTVLHQDWLNGKE | |
| | YKCKVSNKALGAPIEKTISKAKGQPREPQVYTLPPSRDELTKNQVS | |
| | LSCAVKGFYPSDIAVEWESNGQPENNYKTTPPVLDSDGSFFLVSKL | |
| | TVDKSRWQQGNVFSCSVLHEALHSHYTQKSLSLSPGK | |
| 237 | DKTHTCPPCPAPELLGGPSVFLFPPKPKDTLMISRTPEVTCVVVDVS | Partial hinge-Fc |
| | HEDPEVKFNWYVDGVEVHNAKTKPREEQYNSTYRVVSVLTVLHQ | polypeptide with knob |
| | DWLNGKEYKCKVSNKALPAPIEKTISKAKGQPREPQVYTLPPSRDE | mutations-(G₄S)₂-PGRN |
| | LTKNQVSLWCLVKGFYPSDIAVEWESNGQPENNYKTTPPVLDSDG | |
| | SFFLYSKLTVDKSRWQQGNVFSCSVMHEALHNHYTQKSLSLSPGK | |
| | GGGGSGGGGSTRCPDGQFCPVACCLDPGGASYSCCRPLLDKWPTT | |
| | LSRHLGGPCQVDAHCSAGHSCIFTVSGTSSCCPFPEAVACGDGHHC | |
| | CPRGFHCSADGRSCFQRSGNNSVGAIQCPDSQFECPDFSTCCVMVD | |
| | GSWGCCPMPQASCCEDRVHCCPHGAFCDLVHTRCITPTGTHPLAK | |
| | KLPAQRTNRAVALSSSVMCPDARSRCPDGSTCCELPSGKYGCCPMP | |
| | NATCCSDHLHCCPQDTVCDLIQSKCLSKENATTDLLTKLPAHTVGD | |
| | VKCDMEVSCPDGYTCCRLQSGAWGCCPFTQAVCCEDHIHCCPAGF | |
| | TCDTQKGTCEQGPHQVPWMEKAPAHLSLPDPQALKRDVPCDNVSS | |
| | CPSSDTCCQLTSGEWGCCPIPEAVCCSDHQHCCPQGYTCVAEGQCQ | |
| | RGSEIVAGLEKMPARRASLSHPRDIGCDQHTSCPVGQTCCPSLGGS | |
| | WACCQLPHAVCCEDRQHCCPAGYTCNVKARSCEKEVVSAQPTAF | |
| | LARSPHVGVKDVECGEGHFCHDNQTCCRDNRQGWACCPYRQGVC | |
| | CADRRHCCPAGFRCAARGTKCLRREAPRWDAPLRDPALRQLL | |
| 238 | DKTHTCPPCPAPELLGGPSVFLFPPKPKDTLMISRTPEVTCVVVDVS | Partial hinge-Fc |
| | HEDPEVKFNWYVDGVEVHNAKTKPREEQYNSTYRVVSVLTVLHQ | polypeptide with knob |
| | DWLNGKEYKCKVSNKALPAPIEKTISKAKGQPREPQVYTLPPSRDE | mutations-G₄S-PGRN |
| | LTKNQVSLWCLVKGFYPSDIAVEWESNGQPENNYKTTPPVLDSDG | |
| | SFFLYSKLTVDKSRWQQGNVFSCSVMHEALHNHYTQKSLSLSPGK | |
| | GGGGSTRCPDGQFCPVACCLDPGGASYSCCRPLLDKWPTTLSRHL | |
| | GGPCQVDAHCSAGHSCIFTVSGTSSCCPFPEAVACGDGHHCCPRGF | |
| | HCSADGRSCFQRSGNNSVGAIQCPDSQFECPDFSTCCVMVDGSWG | |
| | CCPMPQASCCEDRVHCCPHGAFCDLVHTRCITPTGTHPLAKKLPAQ | |
| | RTNRAVALSSSVMCPDARSRCPDGSTCCELPSGKYGCCPMPNATC | |
| | CSDHLHCCPQDTVCDLIQSKCLSKENATTDLLTKLPAHTVGDVKCD | |
| | MEVSCPDGYTCCRLQSGAWGCCPFTQAVCCEDHIHCCPAGFTCDT | |
| | QKGTCEQGPHQVPWMEKAPAHLSLPDPQALKRDVPCDNVSSCPSS | |
| | DTCCQLTSGEWGCCPIPEAVCCSDHQHCCPQGYTCVAEGQCQRGS | |
| | EIVAGLEKMPARRASLSHPRDIGCDQHTSCPVGQTCCPSLGGSWAC | |
| | CQLPHAVCCEDRQHCCPAGYTCNVKARSCEKEVVSAQPATFLARS | |
| | PHVGVKDVECGEGHFCHDNQTCCRDNRQGWACCPYRQGVCCAD | |
| | RRHCCPAGFRCAARGTKCLRREAPRWDAPLRDPALQLL | |
| 239 | DKTHTCPPCPAPEAAGGPSVFLFPPKPKDTLMISRTPEVTCVVVDVS | Partial hinge-Fc |
| | HEDPEVKFNWYVDGVEVHANKTKPREEQYNSTYRVVSVLTVLHQ | polypeptide with knob |
| | DWLNGKEYKCKVSNKALPAPIEKTISKAKGQPREPQVYTLPPSRDE | and LALA mutations- |
| | LTKNQVSLWCLVKGFYPSDIAVEWESNGQPENNYKTTPPVLDSDG | (G₄S)₂-PGRN |
| | SFFLYSKLTVDKSRWQQGNVFSCSVMHEALHNHYTQKSLSLSPGK | |
| | GGGGSGGGGSTRCPDGQFCPVACCLDPGGASYSCCRPLLDKWPTT | |
| | LSRHLGGPCQVDAHCSAGHSCIFTVSGTSSCCPFPEAVACGDGHHC | |
| | CPRGFHCSADGRSCFQRSGNNSVGAIQCPDSQFECPDFSTCCVMVD | |
| | GSWGCCPMPQASCCEDRVHCCPHGAFCDLVHTRCITPTGTHPLAK | |
| | KLPAQRTNRAVALSSSVMCPDARSRCPDGSTCCELPSGKYGCCPMP | |
| | NATCCSDHLHCCPQDTVCDLIQSKCLSKENATTDLLTKLPAHTVGD | |
| | VKCDMEVSCPDGYTCCRLQSGAWGCCPFTQAVCCEDHIHCCPAGF | |
| | TCDTQKGTCEQGPHQVPWMEKAPAHLSLPDPQALKRDVPCDNVSS | |
| | CPSSDTCCQLTSGEWGCCPIPEAVCCSDHQHCCPQGYTCVAEGQCQ | |
| | RGSEIVAGLEKMPARRASLSHPRDIGCDQHTSCPVGQTCCPSLGGS | |
| | WACCQLPHAVCCEDRQHCCPAGYTCNVKARSCEKEVVSAQPATF | |
| | LARSPHVGVKDVECGEGHFCHDNQTCCRDNRQGWACCPYRQGVC | |
| | CADRRHCCPAGFRCAARGTKCLRREAPRWDAPLRDPALRQLL | |
| 240 | DKTHTCPPCPAPEAAGGPSVFLFPPKPKDTLMISRTPEVTCVVVDVS | Partial hinge-Fc |
| | HEDPEVKFNWYVDGVEVHNAKTKPREEQYNSTYRVVSVLTVLHQ | polypeptide with knob |
| | DWLNGKEYKCKVSNKALPAPIEKTISKAKGQPREPQVYTLPPSRDE | and LALA mutations- |
| | LTKNQVSLWCLVKGFYPSDIAVEWESNGQPENNYKTTPPVLDSDG | G₄S-PGRN |
| | SFFLYSKLTVDKSRWQQGNVFSCSVMHEALHNHYTQKSLSLSPGK | |
| | GGGGSTRCPDGQFCPVACCLDPGGASYSCCRPLLDKWPTTLSRHL | |
| | GGPCQVDAHCSAGHSCIFTVSGTSSCCPFPEAVACGDGHHCCPRGF | |
| | HCSADGRSCFQRSGNNSVGAIQCPDSQFECPDFSTCCVMVDGSWG | |
| | CCPMPQASCCEDRVHCCPHGAFCDLVHTRCITPTGTHPLAKKLPAQ | |
| | RTNRAVALSSSVMCPDARSRCPDGSTCCELPSGKYGCCPMPNATC | |
| | CSDHLHCCPQDTVCDLIQSKCLSKENATTDLLTKLPAHTVGDVKCD | |
| | MEVSCPDGYTCCRLQSGAWGCCPFTQAVCCEDHIHCCPAGFTCDT | |
| | QKGTCEQGPHQVPWMEKAPAHLSLPDPQALKRDVPCDNVSSCPSS | |
| | DTCCQLTSGEWGCCPIPEAVCCSDHQHCCPQGYTCVAEGQCQRGS | |
| | EIVAGLEKMPARRASLSHPRDIGCDQHTSCPVGQTCCPSLGGSWAC | |
| | CQLPHAVCCEDRQHCCPAGYTCNVKARSCEKEVVSAQPATFLARS | |
| | PHVGVKDVECGEGHFCHDNQTCCRDNRQGWACCPYRQGVCCAD | |
| | RRHCCPAGFRCAARGTKCLRREAPRWDAPLRDPALRQLL | |
| 241 | DKTHTCPPCPAPEAAGGPSVFLFPPKPKDTLMISRTPEVTCVVVDVS | Partial hinge-Fc |
| | HEDPEVKFNWYVDGVEVHNAKTKPREEQYNSTYRVVSVLTVLHQ | polypeptide with knob |
| | DWLNGKEYKCKVSNKALGAPIEKTISKAKGQPREPQVYTLPPSRDE | and LALAPG mutations- |
| | LTKNQVSLWCLVKGFYPSDIAVEWESNGQPENNYKTTPPVLDSDG | (G₄S)₂-PGRN |
| | SFFLYSKLTVDKSRWQQGNVFSCSVMHEALHNHYTQKSLSLSPGK | |
| | GGGGSGGGGSTRCPDGQFCPVACCLDPGGASYSCCRPLLDKWPTT | |
| | LSRHLGGPCQVDAHCSAGHSCIFTVSGTSSCCPFPEAVACGDGHHC | |
| | CPRGFHCSADGRSCFQRSGNNSVGAIQCPDSQFECPDFSTCCVMVD | |
| | GSWGCCPMPQASCCEDRVHCCPHGAFCDLVHTRCITPTGTHPLAK | |
| | KLPAQRTNRAVALSSSVMCPDARSRCPDGSTCCELPSGKYGCCPMP | |
| | NATCCSDHLHCCPQDTVCDLIQSKCLSKENATTDLLTKLPAHTVGD | |
| | VKCDMEVSCPDGYTCCRLQSGAWGCCPFTQAVCCEDHIHCCPAGF | |
| | TCDTQKGTCEQGPHQVPWMEKAPAHLSLPDPQALKRDVPCDNVSS | |
| | CPSSDTCCQLTSGEWGCCPIPEAVCCSDHQHCCPQGYTCVAEGQCQ | |
| | RGSEIVAGLEKMPARRASLSHPRDIGCDQHTSCPVGQTCCPSLGGS | |
| | WACCQLPHAVCCEDRQHCCPAGYTCNVKARSCEKEVVSAQPATF | |
| | LARSPHVGVKDVECGEGHFCHDNQTCCRDNRQGWACCPYRQGVC | |
| | CADRRHCCPAGFRCAARGTKCLRREAPRWDAPLRDPALRQLL | |
| 242 | DKTHTCPPCPAPEAAGGPSVFLFPPKPKDTLMISRTPEVTCVVVDVS | Partial hinge-Fc |
| | HEDPEVKFNWYVDGVEVHNAKTKPREEQYNSTYRVVSVLTVLHQ | polypeptide with knob |
| | DWLNGKEYKCKVSNKALGAPIEKTISKAKQPREPQVYTLPPSRDE | and LALAPG mutations- |
| | LTKNQVSLWCLVKGFYPSDIAVEWESNGQPENNYKTTPPVLDSDG | G₄S-PGRN |
| | SFFLYSKLTVDKSRWQQGNVFSCSVMHEALHNHYTQKSLSLSPGK | |
| | GGGGSTRCPDGQFCPVACCLDPGGASYSCCRPLLDKWPTTLSRHL | |
| | GGPCQVDAHCSAGHSCIFTVSGTSSCCPFPEAVACGDGHHCCPRGF | |
| | HCSADGRSCFQRSGNNSVGAIQCPDSQFECPDFSTCCVMVDGSWG | |
| | CCPMPQASCCEDRVHCCPHGAFCDLVHTRCITPTGTHPLAKKLPAQ | |
| | RTNRAVALSSSVMCPDARSRCPDGSTCCELPSGKYGCCPMPNATC | |
| | CSDHLHCCPQDTVCDLIQSKCLSKENATTDLLTKPLAHTVGDVKCD | |
| | MEVSCPDGYTCCRLQSGAWGCCPFTQAVCCEDHIHCCPAGFTCDT | |
| | QKGTCEQGPHQVPWMEKAPAHLSLPDPQALKRDVPCDNVSSCPSS | |
| | DTCCQLTSGEWGCCPIPEAVCCSDHQHCCPQGYTCVAEGQCQRGS | |
| | EIVAGLEKMPARRASLSHPRDIGCDQHTSCPVGQTCCPSLGGSWAC | |
| | CQLPAHVCCEDRQHCCPAGYTCNVKARSCEKEVVSAQPATFLARS | |
| | PHVGVKDVECGEGHFCHDNQTCCRDNRQGWACCPYRQGVCCAD | |
| | RRHCCPAGFRCAARGTKCLRREAPRWDAPLRDPALQLL | |
| 246 | DKTHTCPPCPAPEAAGGPSVFLFPPKPKDTLMISRTPEVTCVVVDVS | Partial hinge-Fc |
| | HEDPEVKFNWYVDGVEVHNAKTKTKPREEQYNSTYRVVSVLTVLHQ | polypeptide with knob, |
| | DWLNGKEYKCKVSNKALPAPIEKTISKAKGQPREPQVYTLPPSRDE | LALA, and LS |
| | LTKNQVSLWCLVKGFYPSDIAVEWESNGQPENNYKTTPPVLDSDG | mutations-G₄S-PRGN |
| | SFFLYSKLTVDKSRWQQGNVFSCSVLHEALHSHYTQKSLSLSPGKG | |
| | GGGSTRCPDGQFCPVACCLDPGGASYSCCRPLLDKWPTTLSRHLG | |
| | GPCQVDAHCSAGHSCIFTVSGTSSCCPFPEAVACGDGHHCCPRGFH | |
| | CSADGRSCFQRSGNNSVGAIQCPDSQFECPDFSTCCVMVDGSWGC | |
| | CPMPQASCCEDRVHCCPHGAFCDLVHTRCITPTGTHPLAKKLPAQR | |
| | TNRAVALSSSVMCPDARSRCPDGSTCCELPSGKYGCCPMPNATCCS | |
| | DHLHCCPQDTVCDLIQSKCLSKENATTDLLTKLPAHTVGDVKCDM | |
| | EVSCPDGYTCCRLQSGAWGCCPFTQAVCCEDHIHCCPAGFTCDTQ | |
| | KGTCEQGPHQVPWMEKAPAHLSLPDPQALKRDVPCDNVSSCPSSD | |
| | TCCQLTSGEWGCCPIPEAVCCSDHQHCCPQGYTCVAEGQCQRGSEI | |
| | VAGLEKMPARRASLSHPRDIGCDQHTSCPVGQTCCPSLGGSWACC | |
| | QLPHAVCCEDRQHCCPAGYTCNVKARSCEKEVVSAQPATFLARSP | |
| | HVGVKDVECGEGHFCHDNQTCCRDNRQGWACCPYRQGVCCADR | |
| | RHCCPAGFRCAARGTKCLRREAPRWDAPLRDPALRQLL | |
| 247 | DKTHTCPPCPAPEAAGGPSVFLFPPKPKDTLMISRTPEVTCVVVDVS | Partial hinge-Fc |
| | HEDPEVKFNWYVDGVEVHNAKTKPREEQYNSTYRVVSVLTVLHQ | polypeptide with knob, |
| | DWLNGKEYKCKVSNKALGAPIEKTISKAKGQPREPQVYTLPPSRDE | LALAPG, and LS |
| | LTKNQVSLWCLVKGFYPSDIAVEWESNGQPENNYKTTPPVLDSDG | mutations-(G₄S)₂-PGRN |
| | SFFLYSKLTVDKSRWQQGNVFSCSVLHEALHSHYTQKSLSLSPGKG | |
| | GGGSGGGGSTRCPDGQFCPVACCLDPGGASYSCCRPLLDKWPTTL | |
| | SRHLGGPCQVDAHCSAGHSCIFTVSGTSSCCPFPEAVACGDGHHCC | |
| | PRGFHCSADGRSCFQRSGNNSVGAIQCPDSQFECPDFSTCCVMVDG | |
| | SWGCCPMPQASCCEDRVHCCPHGAFCDLVHTRCITPTGTHPLAKK | |
| | LPAQRTNRAVALSSSVMCPDARSRCPDGSTCCELPSGKYGCCPMPN | |
| | ATCCSDHLHCCPQDTVCDLIQSKCLSKENATTDLLTKLPAHTVGDV | |
| | KCDMEVSCPDGYTCCRLQSGAWGCCPFTQAVCCEDHIHCCPAGFT | |
| | CDTQKGTCEQGPHQVPWMEKAPAHLSLPDPQALKRDVPCDNVSSC | |
| | PSSDTCCQLTSGEWGCCPIPEAVCCSDHQHCCPQGYTCVAEGQCQR | |
| | GSEIVAGLEKMPARRASLSHPRDIGCDQHTSCPVGQTCCPSLGGSW | |
| | ACCQLPHAVCCEDRQHCCPAGYTCNVKARSCEKEVVSAQPATFLA | |
| | RSPHVGVKDVECGEGHFCHDNQTCCRDNRQGWACCPYRQGVCCA | |
| | DRRHCCPAGFRCAARGTKCLRREAPRWDAPLRDPALRQLL | |
| 248 | DKTHTCPPCPAPEAAGGPSVFLFPPKPKDTLMISRTPEVTCVVVDVS | Partial hinge-Fc |
| | HEDPEVKFNWYVDGVEVHNAKTKPREEQYNSTYRVVSVLTVLHQ | polypeptide with knob, |
| | DWLNGKEYKCKVSNKALGAPIEKTISKAKGQPREPQVYTLPPSRDE | LALAPG, and LS |
| | LTKNQVSLWCLVKGFYPSDIAVEWESNGQPENNYKTTPPVLDSDG | mutations-G₄S-PGRN |
| | SFFLYSKLTVDKSRWQQGNVFSCSVLHEALHSHYTQKSLSLSPGKG | |
| | GGGSTRCPDGQFCPVACCLDPGGASYSCCRPLLDKWPTTLSRHLG | |
| | GPCQVDAHCSAGHSCIFTVSGTSSCCPFPEAVACGDGHHCCPRGFH | |
| | CSADGRSCFQRSGNNSVGAIQCPDSQFECPDFSTCCVMVDGSWGC | |
| | CPMPQASCCEDRVHCCPHGAFCDLVHTRCITPTGTHPLAKKLPAQR | |
| | TNRAVALSSSVMCPDARSRCPDGSTCCELPSGKYGCCPMPNATCCS | |
| | DHLHCCPQDTVCDLIQSKCLSKENATTDLLTKLPAHTVGDVKCDM | |
| | EVSCPDGYTCCRLQSGAWGCCPFTQAVCCEDHIHCCPAGFTCDTQ | |
| | KGTCEQGPHQVPWMEKAPAHLSLPDPQALKRDVPCDNVSSCPSSD | |
| | TCCQLTSGEWGCCPIPEAVCCSDHQHCCPQGYTCVAEGQCQRGSEI | |
| | VAGLEKMPARRASLSHPRDIGCDQHTSCPVGQTCCPSLGGSWACC | |
| | QLPHAVCCEDRQHCCPAGYTCNVKARSCEKEVVSAQPATFLARSP | |
| | HVGVKDVECGEGHFCHDNQTCCRDNRQGWACCPYRQGVCCADR | |
| | RHCCPAGFRCAARGTKCLRREAPRWDAPLRDPALRQLL | |
| 249 | TRCPDGQFCPVACCLDPGGASYSCCRPLLDKWPTTLSRHLGGPCQV | PGRN-G₄S-Partial |
| | DAHCSAGHSCIFTVSGTSSCCPFPEAVACGDGHHCCPRGFHCSADG | hinge-Fc polypeptide |
| | RSCFQRSGNNSVGAIQCPDSQFECPDFSTCCVMVDGSWGCCPMPQ | with knob mutations |
| | ASCCEDRVHCCPHGAFCDLVHTRCITPTGTHPLAKKLPAQRTNRAV | |
| | ALSSSVMCPDARSRCPDGSTCCELPSGKYGCCPMPNATCCSDHLHC | |
| | CPQDTVCDLIQSKCLSKENATTDLLTKLPAHTVGDVKCDMEVSCP | |
| | DGYTCCRLQSGAWGCCPFTQAVCCEDHIHCCPAGFTCDTQKGTCE | |
| | QGPHQVPWMEKAPAHLSLPDPQALKRDVPCDNVSSCPSSDTCCQL | |
| | TSGEWGCCPIPEAVCCSDHQHCCPQGYTCVAEGQCQRGSEIVAGLE | |
| | KMPARRASLSHPRDIGCDQHTSCPVGQTCCPSLGGSWACCQLPHA | |
| | VCCEDRQHCCPAGYTCNVKARSCEKEVVSAQPATFLARSPHVGVK | |
| | DVECGEGHFCHDNQTCCRDNRQGWACCPYRQGVCCADRRHCCPA | |
| | GFRCAARGTKCLRREAPRWDAPLRDPALRQLLGGGGSGGGGSDKT | |
| | HTCPPCPAPELLGGPSVFLFPPKPKDTLMISRTPEVTCVVVDVSHED | |
| | PEVKFNWYVDGVEVHNAKTKPREEQYNSTYRVVSVLTVLHQDWL | |
| | NGKEYKCKVSNKALPAPIEKTISKAKGQPREPQVYTLPPSRDELTK | |
| | NQVSLWCLVKGFYPSDIAVEWESNGQPENNYKTTPPVLDSDGSFFL | |
| | YSKLTVDKSRWQQGNVFSCSVMHEALHNHYTQKSLSLSPGK | |
| 250 | TRCPDGQFCPVACCLDPGGASYSCCRPLLDKWPTTLSRHLGGPCQV | PGRN-G₄S-Partial |
| | DAHCSAGHSCIFTVSGTSSCCPFPEAVACGDGHHCCPRGFHCSADG | hinge-Fc polypeptide |
| | RSCFQRSGNNSVGAIQCPDSQFECPDFSTCCVMVDGSWGCCPMPQ | with knob mutations |
| | ASCCEDRVHCCPHGAFCDLVHTRCITPTGTHPLAKKLPAQRTNRAV | |
| | ALSSSVMCPDARSRCPDGSTCCELPSGKYGCCPMPNATCCSDHLHC | |
| | CPQDTVCDLIQSKCLSKENATTDLLTKLPAHTVGDVKCDMEVSCP | |
| | DGYTCCRLQSGAWGCCPFTQAVCCEDHIHCCPAGFTCDTQKGTCE | |
| | QGPHQVPWMEKAPAHLSLPDPQALKRDVPCDNVSSCPSSDTCCQL | |
| | TSGEWGCCPIPEAVCCSDHQHCCPQGYTCVAEGQCQRGSEIVAGLE | |
| | KMPARRASLSHPRDIGCDQHTSCPVGQTCCPSLGGSWACCQLPHA | |
| | VCCEDRQHCCPAGYTCNVKARSCEKEVVSAQPATFLARSPHVGVK | |
| | DVECGEGHFCHDNQTCCRDNRQGWACCPYRQGVCCADRRHCCPA | |
| | GFRCAARGTKCLRREAPRWDAPLRDPALRQLLGGGGSDKTHTCPP | |
| | CPAPELLGGPSVFLFPPKPKDTLMISRTPEVTCVVVDVSHEDPEVKF | |
| | NWYVDGVEVHNAKTKPREEQYNSTYRVVSVLTVLHQDWLNGKE | |
| | YKCKVSNKALPAPIEKTISKAKGQPREPQVYTLPPSRDELTKNQVSL | |
| | WCLVKGFYPSDIAVEWESNGQPENNYKTTPPVLDSDGSFFLYSKLT | |
| | VDKSRWQQGNVFSCSVMHEALHNHYTQKSLSLSPGK | |
| 251 | TRCPDGQFCPVACCLDPGGASYSCCRPLLDKWPTTLSRHLGGPCQV | PGRN-(G₄S)₂-Partial |
| | DAHCSAGHSCIFTVSGTSSCCPFPEAVACGDGHHCCPRGFHCSADG | hinge-Fc polypeptide |
| | RSCFQRSGNNSVGAIQCPDSQFECPDFSTCCVMVDGSWGCCPMPQ | with knob and LALA |
| | ASCCEDRVHCCPHGAFCDLVHTRCITPTGTHPLAKKLPAQRTNRAV | mutations |
| | ALSSSVMCPDARSRCPDGSTCCELPSGKYGCCPMPNATCCSDHLHC | |
| | CPQDTVCDLIQSKCLSKENATTDLLTKLPAHTVGDVKCDMEVSCP | |
| | DGYTCCRLQSGAWGCCPFTQAVCCEDHIHCCPAGFTCDTQKGTCE | |
| | QGPHQVPWMEKAPAHLSLPDPQALKRDVPCDNVSSCPSSDTCCQL | |
| | TSGEWGCCPIPEAVCCSDHQHCCPQGYTCVAEGQCQRGSEIVAGLE | |
| | KMPARRASLSHPRDIGCDQHTSCPVGQTCCPSLGGSWACCQLPHA | |
| | VCCEDRQHCCPAGYTCNVKARSCEKEVVSAQPATFLARSPHVGVK | |
| | DVECGEGHFCHDNQTCCRDNRQGWACCPYRQGVCCADRRHCCPA | |
| | GFRCAARGTKCLRREAPRWDAPLRDPALRQLLGGGGSGGGGSDKT | |
| | HTCPPCPAPEAAGGPSVFLFPPKPKDTLMISRTPEVTCVVVDVSHED | |
| | PEVKFNWYVDGVEVHNAKTKPREEQYNSTYRVVSVLTVLHQDWL | |
| | NGKEYKCKVSNKALPAPIEKTISKAKGQPREPQVYTLPPSRDELTK | |
| | NQVSLWCLVKGFYPSDIAVEWESNGQPENNYKTTPPVLDSDGSFFL | |
| | YSKLTVDKSRWQQGNVFSCSVMHEALHNHYTQKSLSLSPGK | |
| 252 | TRCPDGQFCPVACCLDPGGASYSCCRPLLDKWPTTLSRHLGGPCQV | PGRN-G₄S-Partial |
| | DAHCSAGHSCIFTVSGTSSCCPFPEAVACGDGHHCCPRGFHCSADG | hinge-Fc polypeptide |
| | RSCFQRSGNNSVGAIQCPDSQFECPDFSTCCVMVDGSWGCCPMPQ | with knob and LALA |
| | ASCCEDRVHCCPHGAFCDLVHTRCITPTGTHPLAKKLPAQRTNRAV | mutations |
| | ALSSSVMCPDARSRCPDGSTCCELPSGKYGCCPMPNATCCSDHLHC | |
| | CPQDTVCDLIQSKCLSKENATTDLLTKLPAHTVGDVKCDMEVSCP | |
| | DGYTCCRLQSGAWGCCPFTQAVCCEDHIHCCPAGFTCDTQKGTCE | |
| | QGPHQVPWMEKAPAHLSLPDPQALKRDVPCDNVSSCPSSDTCCQL | |
| | TSGEWGCCPIPEAVCCSDHQHCCPQGYTCVAEGQCQRGSEIVAGLE | |
| | KMPARRASLSHPRDIGCDQHTSCPVGQTCCPSLGGSWACCQLPHA | |
| | VCCEDRQHCCPAGYTCNVKARSCEKEVVSAQPATFLARSPHVGVK | |
| | DVECGEGHFCHDNQTCCRDNRQGWACCPYRQGVCCADRRHCCPA | |
| | GFRCAARGTKCLRREAPRWDAPLRDPALRQLLGGGGSDKTHTCPP | |
| | CPAPEAAGGPSVFLFPPKPKDTLMISRTPEVTCVVVDVSHEDPEVKF | |
| | NWYVDGVEVHNAKTKPREEQYNSTYRVVSVLTVLHQDWLNGKE | |
| | YKCKVSNKALPAPIEKTISKAKGQPREPQVYTLPPSRDELTKNQVSL | |
| | WCLVKGFYPSDIAVEWESNGQPENNYKTTPPVLDSDGSFFLYSKLT | |
| | VDKSRWQQGNVFSCSVMHEALHNHYTQKSLSLSPGK | |
| 253 | TRCPDGQFCPVACCLDPGGASYSCCRPLLDKWPTTLSRHLGGPCQV | PGRN-(G₄S)₂-Partial |
| | DAHCSAGHSCIFTVSGTSSCCPFPEAVACGDGHHCCPRGFHCSADG | hinge-Fc polypeptide |
| | RSCFQRSGNNSVGAIQCPDSQFECPDFSTCCVMVDGSWGCCPMPQ | with knob and LALAPG |
| | ASCCEDRVHCCPHGAFCDLVHTRCITPTGTHPLAKKLPAQRTNRAV | mutations |
| | ALSSSVMCPDARSRCPDGSTCCELPSGKYGCCPMPNATCCSDHLHC | |
| | CPQDTVCDLIQSKCLSKENATTDLLTKLPAHTVGDVKCDMEVSCP | |
| | DGYTCCRLQSGAWGCCPFTQAVCCEDHIHCCPAGFTCDTQKGTCE | |
| | QGPHQVPWMEKAPAHLSLPDPQALKRDVPCDNVSSCPSSDTCCQL | |
| | TSGEWGCCPIPEAVCCSDHQHCCPQGYTCVAEGQCQRGSEIVAGLE | |
| | KMPARRASLSHPRDIGCDQHTSCPVGQTCCPSLGGSWACCQLPHA | |
| | VCCEDRQHCCPAGYTCNVKARSCEKEVVSAQPATFLARSPHVGVK | |
| | DVECGEGHFCHDNQTCCRDNRQGWACCPYRQGVCCADRRHCCPA | |
| | GFRCAARGTKCLRREAPRWDAPLRDPALRQLLGGGGSGGGGSDKT | |
| | HTCPPCPAPEAAGGPSVFLFPPKPKDTLMISRTPEVTCVVVDVSHED | |
| | PEVKFNWYVDGVEVHNAKTKPREEQYNSTYRVVSVLTVLHQDWL | |
| | NGKEYKCKVSNKALGAPIEKTISKAKGQPREPQVYTLPPSRDELTK | |
| | NQVSLWCLVKGFYPSDIAVEWESNGQPENNYKTTPPVLDSDGSFFL | |
| | YSKLTVDKSRWQQGNVFSCSVMHEALHNHYTQKSLSLSPGK | |
| 254 | TRCPDGQFCPVACCLDPGGASYSCCRPLLDKWPTTLSRHLGGPCQV | PGRN-G₄S-Partial |
| | DAHCSAGHSCIFTVSGTSSCCPFPEAVACGDGHHCCPRGFHCSADG | hinge-Fc polypeptide |
| | RSCFQRSGNNSVGAIQCPDSQFECPDFSTCCVMVDGSWGCCPMPQ | with knob and LALAPG |
| | ASCCEDRVHCCPHGAFCDLVHTRCITPTGTHPLAKKLPAQRTNRAV | mutations |
| | ALSSSVMCPDARSRCPDGSTCCELPSGKYGCCPMPNATCCSDHLHC | |
| | CPQDTVCDLIQSKCLSKENATTDLLTKLPAHTVGDVKCDMEVSCP | |
| | DGYTCCRLQSGAWGCCPFTQAVCCEDHIHCCPAGFTCDTQKGTCE | |
| | QGPHQVPWMEKAPAHLSLPDPQALKRDVPCDNVSSCPSSDTCCQL | |
| | TSGEWGCCPIPEAVCCSDHQHCCPQGYTCVAEGQCQRGSEIVAGLE | |
| | KMPARRASLSHPRDIGCDQHTSCPVGQTCCPSLGGSWACCQLPHA | |
| | VCCEDRQHCCPAGYTCNVKARSCEKEVVSAQPATFLARSPHVGVK | |
| | DVECGEGHFCHDNQTCCRDNRQGWACCPYRQGVCCADRRHCCPA | |
| | GFRCAARGTKCLRREAPRWDAPLRDPALRQLLGGGGSDKTHTCPP | |
| | CPAPEAAGGPSVFLFPPKPKDTLMISRTPEVTCVVVDVSHEDPEVKF | |
| | NWYVDGVEVHNAKTKPREEQYNSTYRVVSVLTVLHQDWLNGKE | |
| | YKCKVSNKALGAPIEKTISKAKGQPREPQVYTLPPSRDELTKNQVS | |
| | LWCLVKGFYPSDIAVEWESNGQPENNYKTTPPVLDSDGSFFLYSKL | |
| | TVDKSRWQQGNVFSCSVMHEALHNHYTQKSLSLSPGK | |
| 255 | TRCPDGQFCPVACCLDPGGASYSCCRPLLDKWPTTLSRHLGGPCQV | PGRN-(G₄S)₂-Partial |
| | DAHCSAGHSCIFTVSGTSSCCPFPEAVACGDGHHCCPRGFHCSADG | hinge-Fc polypeptide |
| | RSCFQRSGNNSVGAIQCPDSQFECPDFSTCCVMVDGSWGCCPMPQ | with knob and LS |
| | ASCCEDRVHCCPHGAFCDLVHTRCITPTGTHPLAKKLPAQRTNRAV | mutations |
| | ALSSSVMCPDARSRCPDGSTCCELPSGKYGCCPMPNATCCSDHLHC | |
| | CPQDTVCDLIQSKCLSKENATTDLLTKLPAHTVGDVKCDMEVSCP | |
| | DGYTCCRLQSGAWGCCPFTQAVCCEDHIHCCPAGFTCDTQKGTCE | |
| | QGPHQVPWMEKAPAHLSLPDPQALKRDVPCDNVSSCPSSDTCCQL | |
| | TSGEWGCCPIPEAVCCSDHQHCCPQGYTCVAEGQCQRGSEIVAGLE | |
| | KMPARRASLSHPRDIGCDQHTSCPVGQTCCPSLGGSWACCQLPHA | |
| | VCCEDRQHCCPAGYTCNVKARSCEKEVVSAQPATFLARSPHVGVK | |
| | DVECGEGHFCHDNQTCCRDNRQGWACCPYRQGVCCADRRHCCPA | |
| | GFRCAARGTKCLRREAPRWDAPLRDPALRQLLGGGGSGGGGSDKT | |
| | HTCPPCPAPELLGGPSVFLFPPKPKDTLMISRTPEVTCVVVDVSHED | |
| | PEVKFNWYVDGVEVHNAKTKPREEQYNSTYRVVSVLTVLHQDWL | |
| | NGKEYKCKVSNKALPAPIEKTISKAKGQPREPQVYTLPPSRDELTK | |
| | NQVSLWCLVKGFYPSDIAVEWESNGQPENNYKTTPPVLDSDGSFFL | |
| | YSKLTVDKSRWQQGNVFSCSVLHEALHSHYTQKSLSLSPGK | |
| 256 | TRCPDGQFCPVACCLDPGGASYSCCRPLLDKWPTTLSRHLGGPCQV | PGRN-G₄S-Partial |
| | DAHCSAGHSCIFTVSGTSSCCPFPEAVACGDGHHCCPRGFHCSADG | hinge-Fc polypeptide |
| | RSCFQRSGNNSVGAIQCPDSQFECPDFSTCCVMVDGSWGCCPMPQ | with knob and LS |
| | ASCCEDRVHCCPHGAFCDLVHTRCITPTGTHPLAKKLPAQRTNRAV | mutations |
| | ALSSSVMCPDARSRCPDGSTCCELPSGKYGCCPMPNATCCSDHLHC | |
| | CPQDTVCDLIQSKCLSKENATTDLLTKLPAHTVGDVKCDMEVSCP | |
| | DGYTCCRLQSGAWGCCPFTQAVCCEDHIHCCPAGFTCDTQKGTCE | |
| | QGPHQVPWMEKAPAHLSLPDPQALKRDVPCDNVSSCPSSDTCCQL | |
| | TSGEWGCCPIPEAVCCSDHQHCCPQGYTCVAEGQCQRGSEIVAGLE | |
| | KMPARRASLSHPRDIGCDQHTSCPVGQTCCPSLGGSWACCQLPHA | |
| | VCCEDRQHCCPAGYTCNVKARSCEKEVVSAQPATFLARSPHVGVK | |
| | DVECGEGHFCHDNQTCCRDNRQGWACCPYRQGVCCADRRHCCPA | |
| | GFRCAARGTKCLRREAPRWDAPLRDPALRQLLGGGGSDKTHTCPP | |
| | CPAPELLGGPSVFLFPPKPKDTLMISRTPEVTCVVVDVSHEDPEVKF | |
| | NWYVDGVEVHNAKTKPREEQYNSTYRVVSVLTVLHQDWLNGKE | |
| | YKCKVSNKALPAPIEKTISKAKGQPREPQVYTLPPSRDELTKNQVSL | |
| | WCLVKGFYPSDIAVEWESNGQPENNYKTTPPVLDSDGSFFLYSKLT | |
| | VDKSRWQQGNVFSCSVLHEALHSHYTQKSLSLSPGK | |
| 257 | TRCPDGQFCPVACCLDPGGASYSCCRPLLDKWPTTLSRHLGGPCQV | PGRN-(G₄S)₂-Partial |
| | DAHCSAGHSCIFTVSGTSSCCPFPEAVACGDGHHCCPRGFHCSADG | hinge-Fc polypeptide |
| | RSCFQRSGNNSVGAIQCPDSQFECPDFSTCCVMVDGSWGCCPMPQ | with knob, LALA, and |
| | ASCCEDRVHCCPHGAFCDLVHTRCITPTGTHPLAKKLPAQRTNRAV | LS mutations |
| | ALSSSVMCPDARSRCPDGSTCCELPSGKYGCCPMPNATCCSDHLHC | |
| | CPQDTVCDLIQSKCLSKENATTDLLTKLPAHTVGDVKCDMEVSCP | |
| | DGYTCCRLQSGAWGCCPFTQAVCCEDHIHCCPAGFTCDTQKGTCE | |
| | QGPHQVPWMEKAPAHLSLPDPQALKRDVPCDNVSSCPSSDTCCQL | |
| | TSGEWGCCPIPEAVCCSDHQHCCPGGYTCVAEGQCQRGSEIVAGLE | |
| | KMPARRASLSHPRDIGCDQHTSCPVGQTCCPSLGGSWACCQLPHA | |
| | VCCEDRQHCCPAGYTCNVKARSCEKEVVSAQPATFLARSPHVGVK | |
| | DVECGEGHFCHDNQTCCRDNRQGWACCPYRQGVCCADRRHCCPA | |
| | GFRCAARGTKCLRREAPRWDAPLRDPALRQLLGGGGSGGGGSDKT | |
| | HTCPPCPAPEAAGGPSVFLFPPKPKDTLMISRTPEVTCVVVDVSHED | |
| | PEVKFNWYVDGVEVHNAKTKPREEQYNSTYRVVSVLTVLHQDWL | |
| | NGKEYKCKVSNKALPAPIEKTISKAKGQPREPQVYTLPPSRDELTK | |
| | NQVSLWCLVKGFYPSDIAVEWESNGQPENNYKTTPPVLDSDGSFFL | |
| | YSKLTVDKSRWQQGNVFSCSVLHEALHYTQKSLSLSPGK | |
| 258 | TRCPDGQFCPVACCLDPGGASYSCCRPLLDKWPTTLSRHLGGPCQV | PGRN-G₄S-Partial |
| | DAHCSAGHSCIFTVSGTSSCCPFPEAVACGDGHHCCPRGFHCSADG | hinge-Fc polypeptide |
| | RSCFQRSGNNSVGAIQCPDSQFECPDFSTCCVMVDGSWGCCPMPQ | with knob, LALA, and |
| | ASCCEDRVHCCPHGAFCDLVHTRCITPTGTHPLAKKLPAQRTNRAV | LS mutations |
| | ALSSSVMCPDARSRCPDGSTCCELPSGKYGCCPMPNATCCSDHLHC | |
| | CPQDTVCDLIQSKCLSKENATTDLLTKLPAHTVGDVKCDMEVSCP | |
| | DGYTCCRLQSGAWGCCPFTQAVCCEDHIHCCPAGFTCDTQKGTCE | |
| | QGPHQVPWMEKAPAHLSLPDPQALKRDVPCDNVSSCPSSDTCCQL | |
| | TSGEWGCCPIPEAVCCSDHQHCCPQGYTCVAEGQCQRGSEIVAGLE | |
| | KMPARRASLSHPRDIGCDQHTSCPVGQTCCPSLGGSWACCQLPHA | |
| | VCCEDRQHCCPAGYTCNVKARSCEKEVVSAQPATFLARSPHVGVK | |
| | DVEDGEGHFCHDNQTCCRDNRQGWACCPYRQGVCCADRRHCCPA | |
| | GFRCAARGTKCLRREAPRWDAPLRDPALRQLLGGGGSDKTHTCPP | |
| | CPAPEAAGGPSVFLFPPKPKDTLMISRTPEVTCVVVDVSHEDPEVKF | |
| | NWYVDGVEVHNAKTKPREEQYNSTYRVVSVLTVLHQDWLNGKE | |
| | YKCKVSNKALPAPIEKTISKAKGQPREPQVYTLPPSRDELTKNQVSL | |
| | WCLVKGFYPSDIAVEWESNGQPENNYKTTPPVLDSDGSFFLYSKLT | |
| | VDKSRWQQGNVFSCSVLHEALHSHYTQKSLSLSPGK | |
| 259 | TRCPDGQFCPVACCLDPGGASYSCCRPLLDKWPTTLSRHLGGPCQV | PGRN-(G₄S)₂-Partial |
| | DAHCSAGHSCIFTVSGTSSCCPFPEAVACGDGHHCCPRGFHCSADG | hinge-Fc polypeptide |
| | RSCFQRSGNNSVGAIQCPDSQFECPDFSTCCVMVDGSWGCCPMPQ | with knob, LALAPG, |
| | ASCCEDRVHCCPHGAFCDLVHTRCITPTGTHPLAKKLPAQRTNRAV | and LS mutations |
| | ALSSSVMCPDARSRCPDGSTCCELPSGKYGCCPMPNATCCSDHLHC | |
| | CPQDTVCDLIQSKCLSKENATTDLLTKLPAHTVGDVKCDMEVSCP | |
| | DGYTCCRLQSGAWGCCPFTQAVCCEDHIHCCPAGFTCDTQKGTCE | |
| | QGPHQVPWMEKAPAHLSLPDPQALKRDVPCDNVSSCPSSDTCCQL | |
| | TSGEWGCCPIPEAVCCSDHQHCCPQGYTCVAEGQCQRGSEIVAGLE | |
| | KMPARRASLSHPRDIGCDQHTSCPVGQTCCPSLGGSWACCQLPHA | |
| | VCCEDRQHCCPAGYTCNVKARSCEKEVVSAQPATFLARSPHVGVK | |
| | DVECGEGHFCHDNQTCCRDNRQGWACCPYRQGVCCADRRHCCPA | |
| | GFRCAARGTKCLRREAPRWDAPLRDPALRQLLGGGGSGGGGSDKT | |
| | HTCPPCPAPEAAGGPSVFLFPPKPKDTLMISRTPEVTCVVVDVSHED | |
| | PEVKFNWYVDGVEVHNAKTKPREEQYNSTYRVVSVLTVLHQDWL | |
| | NGKEYKCKVSNKALGAPIEKTISKAKGQPREPQVYTLPPSRDELTK | |
| | NQVSLWCLVKGFYPSDIAVEWESNGQPENNYKTTPPVLDSDGSFFL | |
| | YSKLTVDKSRWQQGNVFSCSVLHEALHSHYTQKSLSLSPGK | |
| 260 | TRCPDGQFCPVACCLDPGGASYSCCRPLLDKWPTTLSRHLGGPCQV | PGRN-G₄S-Partial |
| | DAHCSAGHSCIFTVSGTSSCCPFPEAVACGDGHHCCPRGFHCSADG | hinge-Fc polypeptide |
| | RSCFQRSGNNSVGAIQCPDSQFECPDFSTCCVMVDGSWGCCPMPQ | with knob, LALAPG, |
| | ASCCEDRVHCCPHGAFCDLVHTRCITPTGTHPLAKKLPAQRTNRAV | and LS mutations |
| | ALSSSVMCPDARSRCPDGSTCCELPSGKYGCCPMPNATCCSDHLHC | |
| | CPQDTVCDLIQSKCLSKENATTDLLTKPAHTVGDVKCDMEVSCP | |
| | DGYTCCRLQSGAWGCCPFTQAVCCEDHIHCCPAGFTCDTQKGTCE | |
| | QGPHQVPWMEKAPAHLSLPDPQALKRDVPCDNVSSCPSSDTCCQL | |
| | TSGEWGCCPIPEAVCCSDHQHCCPQGYTCVAEGQCQRGSEIVAGLE | |
| | KMPARRASLSHPRDIGCDQHTSCPVGQTCCPSLGGSWACCQLPHA | |
| | VCCEDRQHCCPAGYTCNVKARSCEKEVVSAQPATFLARSPHVGVK | |
| | DVECGEGHFCHDNQTCCRDNRQGWACCPYRQGVCCADRRHCCPA | |
| | GFRCAARGTKCLRREAPRWDAPLRDPALRQLLGGGGSDKTHTCPP | |
| | CPAPEAAGGPSVFLFPPKPKDTLMISRTPEVTCVVVDVSHEDPEVKF | |
| | NWYVDGVEVHNAKTKPREEQYNSTYRVVSVLTVLHQDWLNGKE | |
| | YKCKVSNKALGAPIEKTISKAKGQPREPQVYTLPPSRDELTKNQVS | |
| | LWCLVKGFYPSDIAVEWESNGQPENNYKTTPPVLDSDGSFFLYSKL | |
| | TVDKSRWQQGNVFSCSVHEALHSHYTQKSLSLSPGK | |
| 261 | DKTHTCPPCPAPELLGGPSVFLFPPKPKDTLMISRTPEVTCVVVDVS | Partial hinge-Fc |
| | HEDPEVKFNWYVDGVEVHNAKTKPREEQYNSTYRVVSVLTVLHQ | sequence with knob |
| | DWLNGKEYKCKVSNKALPAPIEKTISKAKGQPREPQVYTLPPSRDE | mutation |
| | LTKNQVSLWCLVKGFYPSDIAVEWESNGQPENNYKTTPPVLDSDG | |
| | SFFLYSKLTVDKSRWQQGNVFSCSVMHEALHNHYTQKSLSLSPGK | |
| 262 | DKTHTCPPCPAPEAAGGPSVFLFPPKPKDTLMISRTPEVTCVVVDVS | Partial hinge-Fc |
| | HEDPEVKFNWYVDGVEVHNAKTKPREEQYNSTYRVVSVLTVLHQ | sequence with knob and |
| | DWLNGKEYKCKVSNKALPAPIEKTISKAKGQPREPQVYTLPPSRDE | LALA mutations |
| | LTKNQVSLWCLVKGFYPSDIAVEWESNGQPENNYKTTPPVLDSDG | |
| | SFFLYSKLTVDKSRWQQGNVFSCSVMHEALHNHYTQKSLSLSPGK | |
| 263 | DKTHTCPPCPAPEAAGGPSVFLFPPKPKDTLMISRTPEVTCVVVDVS | Partial hinge-Fc |
| | HEDPEVKFNWYVDGVEVHNAKTKPREEQYNSTYRVVSVLTVLHQ | sequence with knob and |
| | DWLNGKEYKCKVSNKALGAPIEKTISKAKGQPREPQVYTLPPSRDE | LALAPG mutations |
| | LTKNQVSLWCLVKGFYPSDIAVEWESNGQPENNYKTTPPVLDSDG | |
| | SFFLYSKLTVDKSRWQQGNVFSCSVMHEALHNHYTQKSLSLSPGK | |
| 264 | DKTHTCPPCPAPELLGGPSVFLFPPKPKDTLMISRTPEVTCVVVDVS | Partial hinge-Fc |
| | HEDPEVKFNWYVDGVEVHNAKTKPREEQYNSTYRVVSVLTVLHQ | sequence with knob and |
| | DWLNGKEYKCKVSNKALPAPIEKTISKAKGQPREPQVYTLPPSRDE | LS mutations |
| | LTKNQVSLWCLVKGFYPSDIAVEWESNGQPENNYKTTPPVLDSDG | |
| | SFFLYSKLTVDKSRWQQGNVFSCSVLHEALHSHYTQKSLSLSPGK | |
| 265 | DKTHTCPPCPAPEAAGGPSVFLFPPKPKDTLMISRTPEVTCVVVDVS | Partial hinge-Fc |
| | HEDPEVKFNWYVDGVEVHNAKTKPREEQYNSTYRVVSVLTVLHQ | sequence with knob, |
| | DWLNGKEYKCKVSNKALPAPIEKTISKAKGQPREPQVYTLPPSRDE | LALA, and LS |
| | LTKNQVSLWCLVKGFYPSDIAVEWESNGQPENNYKTTPPVLDSDG | mutations |
| | SFFLYSKLTVDKSRWQQGNVFSCSVLHEALHSHYTQKSLSLSPGK | |
| 266 | DKTHTCPPCPAPEAAGGPSVFLFPPKPKDTLMISRTPEVTCVVVDVS | Partial hinge-Fc |
| | HEDPEVKFNWYVDGVEVHNAKTKPREEQYNSTYRVVSVLTVLHQ | sequence with knob, |
| | DWLNGKEYKCKVSNKALGAPIEKTISKAKGQPREPQVYTLPPSRDE | LALAPG, and LS |
| | LTKNQVSLWCLVKGFYPSDIAVEWESNGQPENNYKTTPPVLDSDG | mutations |
| | SFFLYSKLTVDKSRWQQGNVFSCSVLHEALHNHYTQKSLSLSPGK | |
| 267 | DKTHTCPPCPAPELLGGPSVFLFPPKPKDTLMISRTPEVTCVVVDVS | Partial hinge-Fc |
| | HEDPEVKFNWYVDGVEVHNAKTKPREEQYNSTYRVVSVLTVLHQ | sequence with hole |
| | DWLNGKEYKCKVSNKALPAPIEKTISKAKGQPREPQVYTLPPSRDE | mutations |
| | LTKNQVSLSCAVKGFYPSDIAVEWESNGQPENNYKTTPPVLDSDGS | |
| | FFLVSKLTVDKSRWQQGNVFSCSVMHEALHNHYTQKSLSLSPGK | |
| 268 | DKTHTCPPCPAPEAAGGPSVFLFPPKPKDTLMISRTPEVTCVVVDVS | Partial hinge-Fc |
| | HEDPEVKFNWYVDGVEVHNAKTKPREEQYNSTYRVVSVLTVLHQ | sequence with hole and |
| | DWLNGKEYKCKVSNKALPAPIEKTISKAKGQPREPQVYTLPPSRDE | LALA mutations |
| | LTKNQVSLSCAVKGFYPSDIAVEWESNGQPENNYKTTPPVLDSDGS | |
| | FFLVSKLTVDKSRWQQGNVFSCSVMHEALHNHYTQKSLSLSPGK | |
| 269 | DKTHTCPPCPAPEAAGGPSVFLFPPKPKDTLMISRTPEVTCVVVDVS | Partial hinge-Fc |
| | HEDPEVKFNWYVDGVEVHNAKTKPREEQYNSTYRVVSVLTVLHQ | sequence with hole and |
| | DWLNGKEYKCKVSNKALGAPIEKTISKAKGQPREPQVYTLPPSRDE | LALAPG mutations |
| | LTKNQVSLSCAVKGFYPSDIAVEWESNGQPENNYKTTPPVLDSDGS | |
| | FFLVSKLTVDKSRWQQGNVFSCSVMHEALHNHYTQKSLSLSPGK | |
| 270 | DKTHTCPPCPAPELLGGPSVFLFPPKPKDTLMISRTPEVTCVVVDVS | Partial hinge-Fc |
| | HEDPEVKFNWYVDGVEVHNAKTKPREEQYNSTYRVVSVLTVLHQ | sequence with hole and |
| | DWLNGKEYCKCSVSNKALPAPIEKTISKAKGQPREPQVYTLPPSRDE | LS mutations |
| | LTKNQVSLSCAVKGFYPSDIAVEWESNGQPENNYKTTPPVLDSDGS | |
| | FFLVSKLTVDKSRWQQGNVFSCSVLHEALHSHYTQKSLSLSPGK | |
| 271 | DKTHTCPPCPAPEAAGGPSVFLFPPKPKDTLMISRTPEVTCVVVDVS | Partial hinge-Fc |
| | HEDPEVKFNWYVDGVEVHNAKTKPREEQYNSTYRVVSVLTVLHQ | sequence with hole, |
| | DWLNGKEYKCKVSNKALPAPIEKTISKAKGQPREPQVYTLPPSRDE | LALA, and LS |
| | LTKNQVSLSCAVKGFYPSDIAVEWESNGQPENNYKTTPPVLDSDGS | mutations |
| | FFLVSKLTVDKSRWQQGNVFSCSVLHEALHSHYTQKSLSLSPGK | |
| 272 | DKTHTCPPCPAPEAAGGPSVFLFPPKPKDTLMISRTPEVTCVVVDVS | Partial hinge-Fc |
| | HEDPEVKFNWYVDGVEVHNAKTKPREEQYNSTYRVVSVLTVLHQ | sequence with hole, |
| | DWLNGKEYKCKVSNKALGAPIEKTISKAKGQPREPQVYTLPPSRDE | LALAPG, and LS |
| | LTKNQVSLSCAVKGFYPSDIAVEWESNGQPENNYKTTPPVLDSDGS | mutations |
| | FFLVSKLTVDKSRWQQGNVFSCSVLHEALHSHYTQKSLSLSPGK | |
| 273 | DKTHTCPPCPAPELLGGPSVFLFPPKPKDTLMISRTPEVTCVVVDVS | Partial hinge- |
| | HEDPEVKFNWYVDGVEVHNAKTKPREEQYNSTYRVVSVLTVLHQ | CH3C.35.21.17 Fc knob |
| | DWLNGKEYKCKVSNKALPAPIEKTISKAKGQPREPQVYTLPPSRDE | |
| | LTKNQVSLWCLVKGFYPSDIAVLWESYGTEWSSYKTTPPVLDSDG | |
| | SFFLYSKLTVTKEEWQQGFVFSCSVMHEALHNHYTQKSLSLSPGK | |
| 274 | DKTHTCPPCPAPELLGGPSVFLFPPKPKDTLMISRTPEVTCVVVDVS | Partial hinge- |
| | HEDPEVKFNWYVDGVEVHNAKTKPREEQYNSTYRVVSVLTVLHQ | CH3C.35.21.17 Fc knob- |
| | DWLNGKEYKCKVSNKALPAPIEKTISKAKGQPREPQVYTLPPSRDE | (G₄S)₂-PGRN |
| | LTKNQVSLWCLVKGFYPSDIAVLWESYGTEWSSYKTTPPVLDSDG | |
| | SFFLYSKLTVTKEEWQQGFVFSCSVMHEALHNHYTQKSLSLSPGKG | |
| | GGGSGGGGSTRCPDGQFCPVACCLDPGGASYSCCRPLLDKWPTTL | |
| | SRHLGGPCQVDAHCSAGHSCIFTVSGTSSCCPFPEAVACGDGHHCC | |
| | PRGFHCSADGRSCFQRSGNNSVGAIQCPDSQFECPDFSTCCVMVDG | |
| | SWGCCPMPQASCCEDRVHCCPHGAFCDLVHTRCITPTGTHPLAKK | |
| | LPAQRTNRAVALSSSVMCPDARSRCPDGSTCCELPSGKYGCCPMPN | |
| | ATCCSDHLHCCPQDTVCDLIQSKCLSKENATTDLLTKLPAHTVGDV | |
| | KCDMEVSCPDGYTCCRLQSGAWGCCPFTQAVCCEDHIHCCPAGFT | |
| | CDTQKGTCEQGPHQVPWMEKAPAHLSLPDPQALKRDVPCDNVSSC | |
| | PSSDTCCQLTSGEWGCCPIPEAVCCSDHQHCCPQGYTCVAEGQCQR | |
| | GSEIVAGLEKMPARRASLSHPRDIGCDOHTSCPVGOTCCPSLGGSW | |
| | ACCQLPHAVCCEDRQHCCPAGYTCNVKARSCEKEVVSAQPATFLA | |
| | RSPHVGVKDVECGEGHFCHDNQTCCRDNRQGWACCPYRQGVCCA | |
| | DRRHCCPAGFRCAARGTKCLRREAPRWDAPLRDPALRQLL | |
| 275 | TRCPDGQFCPVACCLDPGGASYSCCRPLLDKWPTTLSRHLGGPCQV | PGRN-(G₄S)₂-Partial |
| | DAHCSAGHSCIFTVSGTSSCCPFPEAVACGDGHHCCPRGFHCSADG | hinge-CH3C.35.21.17 Fc |
| | RSCFQRSGNNSVGAIQCPDSQFECPDFSTCCVMVDGSWGCCPMPQ | knob |
| | ASCCEDRVHCCPHGAFCDLVHTRCITPTGTHPLAKKLPAQRTNRAV | |
| | ALSSSVMCPDARSRCPDGSTCCELPSGKYGCCPMPNATCCSDHLHC | |
| | CPQDTVCDLIQSKCLSKENATTDLLTKLPAHTVGDVKCDMEVSCP | |
| | DGYTCCRLQSGAWGCCPFTQAVCCEDHIHCCPAGFTCDTQKGTCE | |
| | QGPHQVPWMEKAPAHLSLPDPQALKRDVPCDNVSSCPSSDTCCQL | |
| | TSGEWGCCPIPEAVCCSDHQHCCPQGYTCVAEGQCQRGSEIVAGLE | |
| | KMPARRASLSHPRDIGCDQHTSCPVGQTCCPSLGGSWACCQLPHA | |
| | VCCEDRQHCCPAGYTCNVKARSCEKEVVSAQPATFLARSPHVGVK | |
| | DVECGEGHFCHDNQTCCRDNRQGWACCPYRQGVCCADRRHCCPA | |
| | GFRCAARGTKCLRREAPRWDAPLRDPALRQLLGGGGSGGGGSDKT | |
| | HTCPPCPAPELLGGPSVFLFPPKPKDTLMISRTPEVTCVVVDVSHED | |
| | PEVKFNWYVDGVEVHNAKTKPREEQYNSTYRVVSVLTVLHQDWL | |
| | NGKEYKCKVSNKALPAPIEKTISKAKGQPREPQVYTLPPSRDELTK | |
| | NQVSLWCLVKGFYPSDIAVLWESYGTEWSSYKTTPPVLDSDGSFFL | |
| | YSKLTVTKEEWQQGFVFSCSVMHEALHNHYTQKSLSLSPGK | |
| 276 | GGGGSGGGGS | Polypeptide linker |
| 277 | GGGGS | Polypeptide linker |
| 278 | MWTLVSWVALTAGLVAG | Progranulin signal |
| | | sequence |
| 279 | DVECGEGHFCHDNQTCCRDNRQGWACCPYRQGVCCADRRHCCPA | Granulin E (amine acids |
| | GFRCAARGTKCL | 518-573 of SEQ ID |
| | | NO: 211) |
| 280 | DKTHTCPPCPAPELLGGPSVFLFPPKPKDTLMISRTPEVTCVVVDVS | Partial hinge-Fc |
| | HEDPEVKFNWYVDGVEVHNAKTKPREEQYNSTYRVVSVLTVLHQ | polypeptide with hole |
| | DWLNGKEYKCKVSNKALPAPIEKTISKAKGQPREPQVYTLPPSRDE | mutations-(G₄S)₂- |
| | LTKNQVSLSCAVKGFYPSDIAVEWESNGQPENNYKTTPPVLDSDGS | Granulin E fusion |
| | FFLVSKLTVDKSRWQQGNVFSCSVMHEALHNHYTQKSLSLSPGKG | (amino acids 497-593 of |
| | GGGSGGGGSKEVVSAQPATFLARSPHVGVKDVECGEGHFCHDNQT | SEQ ID NO: 211) |
| | CCRDNRQGWACCPYRQGVCCADRRHCCPAGFRCAARGTKCLRRE | |
| | APRWDAPLRDPALRQLL | |
| 281 | DKTHTCPPCPAPELLGGPSVFLFPPKPKDTLMISRTPEVTCVVVDVS | Partial hinge-Clone |
| | HEDPEVKFNWYVDGVEVHNAKTKPREEQYNSTYRVVSVLTVLHQ | CH3C.35.23.2 with knob |
| | DWLNGKEYKCKVSNKALPAPIEKTISKAKGQPREPQVYTLPPSRDE | mutation |
| | LTKNQVSLWCLVKGFYPSDIAVEWESYGTEWANYKTTPPVLDSDG | |
| | SFFLYSKLTVTKEEWQQGFVFSCSVMHEALHNHYTQKSLSLSPGK | |
| 282 | DKTHTCPPCPAPEAAGGPSVFLFPPKPKDTLMISRTPEVTCVVVDVS | Partial hinge-Clone |
| | HEDPEVKFNWYVDGVEVHNAKTKPREEQYNSTYRVVSVLTVLHQ | CH3C.35.23.2 with knob |
| | DWLNGKEYKCKVSNKALGAPIEKTISKAKGQPREPQVYTLPPSRDE | and LALAPG mutations |
| | LTKNQVSLWCLVKGFYPSDIAVEWESYGTEWANYKTTPPVLDSDG | |
| | SFFLYSKLTVTKEEWQQGFVFSCSVMHEALHNHYTQKSLSLSPGK | |
| 283 | DKTHTCPPCPAPELLGGPSVFLFPPKPKDTLMISRTPEVTCVVVDVS | Partial hinge-Clone |
| | HEDPEVKFNWYVDGVEVHNAKTKPREEQYNSTYRVVSVLTVLHQ | CH3C.35.23.2 with knob |
| | DWLNGKEYKCKVSNKALPAPIEKTISKAKGQPREPQVYTLPPSRDE | and LS mutations |
| | LTKNQVSLWCLVKGFYPSDIAVEWESYGTEWANYKTTPPVLDSDG | |
| | SFFLYSKLTVTKEEWQQGFVFSCSVLHEALHSHYTQKSLSLPGK | |
| 284 | DKTHTCPPCPAPEAAGGPSVFLFPPKPKDTLMISRTPEVTCVVVDVD | Partial hinge-Clone |
| | HEDPEVKFNWYVDGVEVHNAKTKPREEQYNSTYRVVSVLTVLHQ | CH3C.35.23.2 with |
| | DWLNGKEYKCKVSNKALPAPIEKTISKAKGQPREPQVYTLPPSRDE | knob, LALA, and LS |
| | LTKNQVSLWCLVKGFYPSDIAVEWESYGTEWANYKTTPPVLDSDG | mutations |
| | SFFLYSKLTVTKEEWQQGFVFSCSVLHEALHSHYTQKSLSLSPGK | |
| 285 | DKTHTCPPCPAPEAAGGPSVFLFPPKPKDTLMISRTPEVTCVVVDVS | Partial hinge-Clone |
| | HEDPEVKFNWYVDGVEVHNAKTKPREEQYNSTYRVVSVLTVLHQ | CH3C.35.23.2 with |
| | DWLNGKEYKCKVSNKALGAPIEKTISKAKGQPREPQVYTLPPSRDE | knob, LALAPG, and LS |
| | LTKNQVSLWCLVKGFYPSDIAVEWESYGTEWANYKTTPPVLDSDG | mutations |
| | SFFLYSKLTVTKEEWQQGFVFSCSVLHEALHSHYTQKSLSLSPGK | |
| 286 | DKTHTCPPCPAPELLGGPSVFLFPPKPKDTLMISRTPEVTCVVVDVS | Partial hinge-Clone |
| | HEDPEVKFNWYVDGVEVHNAKTKPREEQYNSTYRVVSVLTVLHQ | CH3C.35.21.17.2 with |
| | DWLNGKEYKCKVSNKALPAPIEKTISKAKGQPREPQVYTLPPSRDE | knob mutation |
| | LTKNQVSLWCLVKGFYPSDIAVLWESYGTEWASYKTTPPVLDSDG | |
| | SFFLYSKLTVTKEEWQQGFVFSCSVMHEALHNHYTQKSLSLSPGK | |
| 287 | DKTHTCPPCPAPEAAGGPSVFLFPPKPKDTLMISRTPEVTCVVVDVS | Partial hinge-Clone |
| | HEDPEVKFNWYVDGVEVHNAKTKPREEQYNSTYRVVSVLTVLHQ | CH3C.35.21.17.2 with |
| | DWLNGKEYKCKVSNKALGAPIEKTISKAKGQPREPQVYTLPPSRDE | knob and LALAPG |
| | LTKNQVSLWCLVKGFYPSDIAVLWESYGTEWASYKTTPPVLDSDG | mutations |
| | SFFLYSKLTVTKEEWQQGFVFSCSVMHEALHNHYTQKSLSLSPGK | |
| 288 | DKTHTCPPCPAPELLGGPSVFLFPPKPKDTLMISRTPEVTCVVVDVS | Partial hinge-Clone |
| | HEDPEVKFNWYVDGVEVHNAKTKPREEQYNSTYRVVSVLTVLHQ | CH3C.35.21.17.2 with |
| | DWLNGKEYKCKVSNKALPAPIEKTISKAKGQPREPQVYTLPPSRDE | knob and LS mutations |
| | LTKNQVSLWCLVKGFYPSDIAVLWESYGTEWASYKTTPPVLDSDG | |
| | SFFLYSKLTVTKEEWQQGFVFSCSVLHEALHSHYTQKSLSLSPGK | |
| 289 | DKTHTCPPCPAPEAAGGPSVFLFPPKPKDTLMISRTPEVTCVVVDVS | Partial hinge-Clone |
| | HEDPEVKFNWYVDGVEVHNAKTKPREEQYNSTYRVVSVLTVLHQ | CH3C.35.21.17.2 with |
| | DWLNGKEYKCKVSNKALPAPIEKTISKAKGQPREPQVYTLPPSRDE | knob, LALA, and LS |
| | LTKNQVSLWCLVKGFYPSDIAVLWESYGTEWASYKTTPPVLDSDG | mutations |
| | SFFLYSKLTVTKEEWQQGFVFSCSVLHEALSHYTQKSLSLSPGL | |
| 290 | DKTHTCPPCPAPEAAGGPSVFLFPPKPKDTLMISRTPEVTCVVVDVS | Partial hinge-Clone |
| | HEDPEVKFNWYVDGVEVHNAKTKPREEQYNSTYRVVSVLTVLHQ | CH3C.35.21.17.2 with |
| | DWLNGKEYKCKVSNKALGAPIEKTISKAKGQPREPQVYTLPPSRDE | knob, LALAPG, and LS |
| | LTKNQVSLWCLVKGFYPSDIAVLWESYGTEWASYKTTPPVLDSDG | mutations |
| | SFFLYSKLTVTKEEWQQGFVFSCSVLHEALHSHYTQKSLSLSPGK | |
| 291 | DKTHTCPPCPAPEAAGGPSVFLFPPKPKDTLMISRTPEVTCVVVDVS | Partial hinge-Clone |
| | HEDPEVKFNWYVDGVEVHNAKTKPREEQYNSTYRVVSVLTVLHQ | CH3C.35.21.17 with |
| | DWLNGKEYKCKVSNKALPAPIEKTISKAKGQPREPQVYTLPPSRDE | knob and LALA |
| | LTKNQVSLWCLVKGFYPSDIAVLWESYGTEWSSYKTTPPVLDSDG | mutations |
| | SFFLYSKLTVTKEEWQQGFVFSCSVMHEALHNHYTQKSLSLSPGK | |
| 292 | DKTHTCPPCPAPEAAGGPSVFLFPPKPKDTLMISRTPEVTCVVVDVS | Partial hinge-Clone |
| | HEDPEVKFNWYVDGVEVHNAKTKPREEQYNSTYRVVSVLTVLHQ | CH3C.35.21.17 with |
| | DWLNGKEYKCKVSNKALGAPIEKTISKAKGQPREPQVYTLPPSRDE | knob and LALAPG |
| | LTKNQVSLWCLVKGFYPSDIAVLWESYGTEWSSYKTTPPVLDSDG | mutations |
| | SFFLYSKLTVTKEEWQQGFVFSCSVMHEALHNHYTQKSLSLSPGK | |
| 293 | DKTHTCPPCPAPELLGGPSVFLFPPKPKDTLMISRTPEVTCVVVDVS | Partial hinge-Clone |
| | HEDPEVKFNWYVDGVEVHNAKTKPREEQYNSTYRVVSVLTVLHQ | CH3C.35.21.17 with |
| | DWLNGKEYKCKVSNKALPAPIEKTISKAKGQPREPQVYTLPPSRDE | knob and LS mutations |
| | LTKNQVSLWCLVKGFYPSDIAVLWESYGTEWSSYKTTPPVLDSDG | |
| | SFFLYSKLTVTKEEWQQGFVFSCSVLHEALHSHYTQKSLSLSPGK | |
| 294 | DKTHTCPPCPAPEAAGGPSVFLFPPKPKDTLMISRTPEVTCVVVDVS | Partial hinge-Clone |
| | HEDPEVKFNWYVDGVEVHNAKTKPREEQYNSTYRVVSVLTVLHQ | CH3C.35.21.17 with |
| | DWLNGKEYKCKVSNKALPAPIEKTISKAKGQPREPQVYTLPPSRDE | knob, LALA, and LS |
| | LTKNQVSLWCLVKGFYPSDIAVLEWSYGTEWSSYKTTPPVLDSDG | mutations |
| | SFFLYSKLTVTKEEWQQGFVFSCSVLHEALHSHYTQKSLSLSPGK | |
| 295 | DKTHTCPPCPAPEAAGGPSVFLFPPKPKDTLMISRTPEVTCVVVDVS | Partial hinge-Clone |
| | HEDPEVKFNWYVDGVEVHNAKTKPREEQYNSTYRVVSVLTVLHQ | CH3C.35.21.17 with |
| | DWLNGKEYKCKVSNKALGAPIEKTISKAKGQPREPQVYTLPPSRDE | knob, LALAPG, and LS |
| | LTKNQVSLWCLVKGFYPSDIAVLWESYGTEWSSYKTTPPVLDSDG | mutations |
| | SFFLYSKLTVTKEEWQQGFVFSCSVLHEALHSHYTQKSLSLSPGK | |
| 296 | AQNSVIIVDKNGRLVYLVENPGGYVAYSKAATVTGKLVHANFGTK | Apical domain insert of |
| | KDFEDLYTPVNGSIVIVRAGKITFAEKVANAESLNAIGVLIYMDQTK | human transferrin |
| | FPIVNAELSFFGHAHLGTGDPYTPGFPSFNHTQFPPSRSSGLPNIPVQ | receptor protein 1 |
| | TISRAAAEKLFGNMEGDCPSDWKTDSTCRMVTSESKNVKLTVSN | (TFR1) |
| 297 | AQNSVIIVDKNGGLVYLVENPGGYVAYSKAATVTGKLVHANFGTK | Apical domian of |
| | KDFEDLDSPVNGSIVIVRAGKITFAEKVANAESLNAIGVLIYMDQTK | Macaca mulatta (rhesus |
| | FPIVKADLSFFGHAHLGTGDPYTPGFPSFNHTQFPPSQSSGLPNIPVQ | monkey) TfR (NCBI |
| | TISRAAAEKLFGNMEGDCPSDWKTDSTCKMVTSENKSVKLTVSN | Reference Sequence |
| | | NP_001244232.1); it has |
| | | 95% identity to the |
| | | apical domain of the |
| | | native human TfR |
| 298 | AQNSVIIVDKNGLVYLVENPGGYVAYSKAATVTGKLVHANFGTK | Apical domain of |
| | KDFEDLHTPVNGSIVIVRAGKITFAEKVANAESLNAIGVLIYMDQTK | chimpanzee TfR (NCBI |
| | FPIVNAELSFFGHAHLGTGDPYTPGFPSFNHTQFPPSRSSGLPNIPVQ | Reference Sequence |
| | TVSRAAAEKLFGNMEGDCPSDWKTDSTCRMVTSESKNVKLTVSN | XP_003310238.1); it is |
| | | 98% identical to the |
| | | apical domain of the |
| | | native human TfR |
| 299 | AQNSVIIVDKNGGLVYLVENPGGYVAYSKAATVTGKLVHANFGTK | Apical domain of |
| | KDFEDLDSPVNGSIVIVRAGKITFAEKVANAESLNAIGVLIYMDQTK | Macaca fascicularis |
| | FPIVKADLSFFGHAHLGTGDPYTPGFPSFNHTQFPPSQSSGLPNIPVQ | (cynomolgous monkey) |
| | TISRAAAEKLFGNMEGDCPSDWKTDSTCKMVTSENKSVKLTVSN | TfR (NCBI Reference |
| | | Sequence |
| | | XP_005545315); it is |
| | | 96% identical to the |
| | | apical domain of the |
| | | native human TfR |
| 300 | [chemical structure] | Chimeric TfR polypeptide sequence expressed in transgenic mouse (The italicized portion represents the cytoplasmic domain, the bolded portion represents the transmembrane domain, the portion in grey represents the extracellular domain, and the bold and underlined portion represents the apical domain) |
| 301 | GCTCAGAACTCCGTGATCATCGTGGATAAGAACGGCCGGCTGGT | DNA sequence of human |
| | GTACCTGGTGGAGAACCCTGGCGGATACGTGGCTTACTCTAAGG | apical domain insert |
| | CCGCTACCGTGACAGGCAAGCTGGTGCACGCCAACTTCGGAACC | |
| | AAGAAGGACTTTGAGGATCTGTACACACCAGTGAACGGCTCTAT | |
| | CGTGATCGTGCGCGCTGGAAAGATCACCTTCGCCGAGAAGGTGG | |
| | CTAACGCCGAGAGCCTGAACGCCATCGGCGTGCTGATCTACATG | |
| | GATCAGACAAAGTTTCCCATCGTGAACGCTGAGCTGTCTTTCTTT | |
| | GGACACGCTCACCTGGGCACCGGAGACCCATACACACCCGGATT | |
| | CCCTAGCTTTAACCACACCCAGTTCCCCCCTTCCAGGTCTAGCGG | |
| | ACTGCCAAACATCCCCGTGCAGACAATCAGCAGAGCCGCTGCCG | |
| | AGAAGCTGTTTGGCAACATGGAGGGAGACTGCCCCTCCGATTGG | |
| | AAGACCGACTCTACATGTAGGATGGTGACCTCCGAGTCAAAAAA | |
| | TGTCAAACTCACCGTGTCCAAT | |
| 302 | YxTEWSS | Library motif |
| 303 | 6xHis | His tag |
| 304 | GGSG | Polypeptide linker |
| 305 | SGGG | Polypeptide linker |
| 306 | KESGSVSSEQLAQFRSLD | Polypeptide linker |
| 307 | EGKSSGSGSESKST | Polypeptide linker |
| 308 | GSAGSAAGSGEF | Polypeptide linker |
| 309 | AEAAAKA | Polypeptide linker |

The application's sequence listing, which the Patent Office published only in electronic form, follows.

SEQUENCE LISTING (309 sequences)

SEQ ID NO: 1 - protein, 217 aa, Homo sapiens
APELLGGPSVFLFPPKPKDTLMISRTPEVTCVVVDVSHEDPEVKFNWYVDGVEVHNAKTKPREEQYNSTYRVVSVLTVLHQDWLNGKEYKCKVSNKALPAPIEKTISKAKGQPREPQVYTLPPSRDELTKNQVSLTCLVKGFYPSDIAVEWESNGQPENNYKTTPPVLDSDGSFFLYSKLTVDKSRWQQGNVFSCSVMHEALHNHYTQKSLSLSPGK

SEQ ID NO: 2 - protein, 110 aa, Homo sapiens
APELLGGPSVFLFPPKPKDTLMISRTPEVTCVVVDVSHEDPEVKFNWYVDGVEVHNAKTKPREEQYNSTYRVVSVLTVLHQDWLNGKEYKCKVSNKALPAPIEKTISKAK

SEQ ID NO: 3 - protein, 107 aa, Homo sapiens
GQPREPQVYTLPPSRDELTKNQVSLTCLVKGFYPSDIAVEWESNGQPENNYKTTPPVLDSDGSFFLYSKLTVDKSRWQQGNVFSCSVMHEALHNHYTQKSLSLSPGK

SEQ ID NO: 4 - protein, 217 aa, Artificial Sequence
  source: /note="Description of Artificial Sequence: Synthetic polypeptide"
APELLGGPSVFLFPPKPKDTLMISRTPEVTCVVVDVSHEDPEVKFNWYVDGVEVHNAKTKPREEQYNSTYRVVSVLTVLHQDWLNGKEYKCKVSNKALPAPIEKTISKAKGQPREPQVYTLPPSRDELTKNQVSLTCLVKGFYPSDIAVEWESLGLVWVGYKTTPPVLDSDGSFFLYSKLTVAKSTWQQGWVFSCSVMHEALHNHYTQKSLSLSPGK

SEQ ID NO: 5 - protein, 217 aa, Artificial Sequence
  source: /note="Description of Artificial Sequence: Synthetic polypeptide"
APELLGGPSVFLFPPKPKDTLMISRTPEVTCVVVDVSHEDPEVKFNWYVDGVEVHNAKTKPREEQYNSTYRVVSVLTVLHQDWLNGKEYKCKVSNKALPAPIEKTISKAKGQPREPQVYTLPPSRDELTKNQVSLTCLVKGFYPSDIAVEWESYGTVWSHYKTTPPVLDSDGSFFLYSKLTVSKSEWQQGYVFSCSVMHEALHNHYTQKSLSLSPGK

SEQ ID NO: 6 - protein, 217 aa, Artificial Sequence
  source: /note="Description of Artificial Sequence: Synthetic polypeptide"
APELLGGPSVFLFPPKPKDTLMISRTPEVTCVVVDVSHEDPEVKFNWYVDGVEVHNAKTKPREEQYNSTYRVVSVLTVLHQDWLNGKEYKCKVSNKALPAPIEKTISKAKGQPREPQVYTLPPSRDELTKNQVSLTCLVKGFYPSDIAVEWESYGTEWSQYKTTPPVLDSDGSFFLYSKLTVEKSDWQQGHVFSCSVMHEALHNHYTQKSLSLSPGK

SEQ ID NO: 7 - protein, 217 aa, Artificial Sequence
  source: /note="Description of Artificial Sequence: Synthetic polypeptide"
APELLGGPSVFLFPPKPKDTLMISRTPEVTCVVVDVSHEDPEVKFNWYVDGVEVHNAKTKPREEQYNSTYRVVSVLTVLHQDWLNGKEYKCKVSNKALPAPIEKTISKAKGQPREPQVYTLPPSRDELTKNQVSLTCLVKGFYPSDIAVEWESVGTPWALYKTTPPVLDSDGSFFLYSKLTVLKSEWQQGWVFSCSVMHEALHNHYTQKSLSLSPGK

SEQ ID NO: 8 - protein, 217 aa, Artificial Sequence
  source: /note="Description of Artificial Sequence: Synthetic polypeptide"
APELLGGPSVFLFPPKPKDTLMISRTPEVTCVVVDVSHEDPEVKFNWYVDGVEVHNAKTKPREEQYNSTYRVVSVLTVLHQDWLNGKEYKCKVSNKALPAPIEKTISKAKGQPREPQVYTLPPSRDELTKNQVSLTCLVKGFYPSDIAVEWESYGTVWSKYKTTPPVLDSDGSFFLYSKLTVSKSEWQQGFVFSCSVMHEALHNHYTQKSLSLSPGK

SEQ ID NO: 9 - protein, 217 aa, Artificial Sequence
  source: /note="Description of Artificial Sequence: Synthetic polypeptide"
APELLGGPSVFLFPPKPKDTLMISRTPEVTCVVVDVSHEDPEVKFNWYVDGVEVHNAKTKPREEQYNSTYRVVSVLTVLHQDWLNGKEYKCKVSNKALPAPIEKTISKAKGQPREPQVYTLPPSRDELTKNQVSLTCLVKGFYPSDIAVEWESLGHVWAVYKTTPPVLDSDGSFFLYSKLTVPKSTWQQGWVFSCSVMHEALHNHYTQKSLSLSPGK

SEQ ID NO: 10 - protein, 217 aa, Artificial Sequence
  source: /note="Description of Artificial Sequence: Synthetic polypeptide"
APELLGGPSVFLFPPKPKDTLMISRTPEVTCVVVDVSHEDPEVKFNWYVDGVEVHNAKTKPREEQYNSTYRVVSVLTVLHQDWLNGKEYKCKVSNKALPAPIEKTISKAKGQPREPQVYTLPPSRDELTKNQVSLTCLVKGFYPSDIAVEWESLGLVWVGYKTTPPVLDSDGSFFLYSKLTVPKSTWQQGWVFSCSVMHEALHNHYTQKSLSLSPGK

SEQ ID NO: 11 - protein, 217 aa, Artificial Sequence
  source: /note="Description of Artificial Sequence: Synthetic polypeptide"
APELLGGPSVFLFPPKPKDTLMISRTPEVTCVVVDVSHEDPEVKFNWYVDGVEVHNAKTKPREEQYNSTYRVVSVLTVLHQDWLNGKEYKCKVSNKALPAPIEKTISKAKGQPREPQVYTLPPSRDELTKNQVSLTCLVKGFYPSDIAVEWESMGHVWVGYKTTPPVLDSDGSFFLYSKLTVDKSTWQQGWVFSCSVMHEALHNHYTQKSLSLSPGK

SEQ ID NO: 12 - protein, 217 aa, Artificial Sequence
  source: /note="Description of Artificial Sequence: Synthetic polypeptide"
APELLGGPSVFLFPPKPKDTLMISRTPEVTCVVVDVSHEDPEVKFNWYVDGVEVHNAKTKPREEQYNSTYRVVSVLTVLHQDWLNGKEYKCKVSNKALPAPIEKTISKAKGQPREPQVYTLPPSRDELTKNQVSLTCLVKGFYPSDIAVEWESLGLVWVFSKTTPPVLDSDGSFFLYSKLTVPKSTWQQGWVFSCSVMHEALHNHYTQKSLSLSPGK

SEQ ID NO: 13 - protein, 217 aa, Artificial Sequence
  source: /note="Description of Artificial Sequence: Synthetic polypeptide"
APELLGGPSVFLFPPKPKDTLMISRTPEVTCVVVDVSHEDPEVKFNWYVDGVEVHNAKTKPREEQYNSTYRVVSVLTVLHQDWLNGKEYKCKVSNKALPAPIEKTISKAKGQPREPQVYTLPPSRDELTKNQVSLTCLVKGFYPSDIAVEWESYGTEWSSYKTTPPVLDSDGSFFLYSKLTVTKSEWQQGFVFSCSVMHEALHNHYTQKSLSLSPGK

SEQ ID NO: 14 - protein, 217 aa, Artificial Sequence
  source: /note="Description of Artificial Sequence: Synthetic polypeptide"
APELLGGPSVFLFPPKPKDTLMISRTPEVTCVVVDVSHEDPEVKFNWYVDGVEVHNAKTKPREEQYNSTYRVVSVLTVLHQDWLNGKEYKCKVSNKALPAPIEKTISKAKGQPREPQVYTLPPSRDELTKNQVSLTCLVKGFYPSDIAVEWESYGTEWSNYKTTPPVLDSDGSFFLYSKLTVSKSEWQQGFVFSCSVMHEALHNHYTQKSLSLSPGK

SEQ ID NO: 15 - protein, 217 aa, Artificial Sequence
  source: /note="Description of Artificial Sequence: Synthetic polypeptide"
APELLGGPSVFLFPPKPKDTLMISRTPEVTCVVVDVSHEDPEVKFNWYVDGVEVHNAKTKPREEQYNSTYRVVSVLTVLHQDWLNGKEYKCKVSNKALPAPIEKTISKAKGQPREPQVYTLPPSRDELTKNQVSLTCLVKGFYPSDIAVEWESLGHVWVGYKTTPPVLDSDGSFFLYSKLTVSKSEWQQGWVFSCSVMHEALHNHYTQKSLSLSPGK

SEQ ID NO: 16 - protein, 217 aa, Artificial Sequence
  source: /note="Description of Artificial Sequence: Synthetic polypeptide"
APELLGGPSVFLFPPKPKDTLMISRTPEVTCVVVDVSHEDPEVKFNWYVDGVEVHNAKTKPREEQYNSTYRVVSVLTVLHQDWLNGKEYKCKVSNKALPAPIEKTISKAKGQPREPQVYTLPPSRDELTKNQVSLTCLVKGFYPSDIAVEWESLGHVWVATKTTPPVLDSDGSFFLYSKLTVPKSTWQQGWVFSCSVMHEALHNHYTQKSLSLSPGK

SEQ ID NO: 17 - protein, 217 aa, Artificial Sequence
  source: /note="Description of Artificial Sequence: Synthetic polypeptide"
APELLGGPSVFLFPPKPKDTLMISRTPEVTCVVVDVSHEDPEVKFNWYVDGVEVHNAKTKPREEQYNSTYRVVSVLTVLHQDWLNGKEYKCKVSNKALPAPIEKTISKAKGQPREPQVYTLPPSRDELTKNQVSLTCLVKGFYPSDIAVEWESLGPVWVHTKTTPPVLDSDGSFFLYSKLTVPKSTWQQGWVFSCSVMHEALHNHYTQKSLSLSPGK

SEQ ID NO: 18 - protein, 217 aa, Artificial Sequence
  source: /note="Description of Artificial Sequence: Synthetic polypeptide"
APELLGGPSVFLFPPKPKDTLMISRTPEVTCVVVDVSHEDPEVKFNWYVDGVEVHNAKTKPREEQYNSTYRVVSVLTVLHQDWLNGKEYKCKVSNKALPAPIEKTISKAKGQPREPQVYTLPPSRDELTKNQVSLTCLVKGFYPSDIAVEWESLGHVWVDQKTTPPVLDSDGSFFLYSKLTVPKSTWQQGWVFSCSVMHEALHNHYTQKSLSLSPGK

SEQ ID NO: 19 - protein, 217 aa, Artificial Sequence
  source: /note="Description of Artificial Sequence: Synthetic polypeptide"
APELLGGPSVFLFPPKPKDTLMISRTPEVTCVVVDVSHEDPEVKFNWYVDGVEVHNAKTKPREEQYNSTYRVVSVLTVLHQDWLNGKEYKCKVSNKALPAPIEKTISKAKGQPREPQVYTLPPSRDELTKNQVSLTCLVKGFYPSDIAVEWESLGHVWVNQKTTPPVLDSDGSFFLYSKLTVPKSTWQQGWVFSCSVMHEALHNHYTQKSLSLSPGK

SEQ ID NO: 20 - protein, 217 aa, Artificial Sequence
  source: /note="Description of Artificial Sequence: Synthetic polypeptide"
APELLGGPSVFLFPPKPKDTLMISRTPEVTCVVVDVSHEDPEVKFNWYVDGVEVHNAKTKPREEQYNSTYRVVSVLTVLHQDWLNGKEYKCKVSNKALPAPIEKTISKAKGQPREPQVYTLPPSRDELTKNQVSLTCLVKGFYPSDIAVEWESLGHVWVNFKTTPPVLDSDGSFFLYSKLTVPKSTWQQGWVFSCSVMHEALHNHYTQKSLSLSPGK

SEQ ID NO: 21 - protein, 217 aa, Artificial Sequence
  source: /note="Description of Artificial Sequence: Synthetic polypeptide"
APELLGGPSVFLFPPKPKDTLMISRTPEVTCVVVDVSHEDPEVKFNWYVDGVEVHNAKTKPREEQYNSTYRVVSVLTVLHQDWLNGKEYKCKVSNKALPAPIEKTISKAKGQPREPQVYTLPPSRDELTKNQVSLTCLVKGFYPSDIAVWWESLGHVWAVYKTTPPVLDSDGSFFLYSKLTVPKSTWQQGWVFSCSVMHEALHNHYTQKSLSLSPGK

SEQ ID NO: 22 - protein, 217 aa, Artificial Sequence
  source: /note="Description of Artificial Sequence: Synthetic polypeptide"
APELLGGPSVFLFPPKPKDTLMISRTPEVTCVVVDVSHEDPEVKFNWYVDGVEVHNAKTKPREEQYNSTYRVVSVLTVLHQDWLNGKEYKCKVSNKALPAPIEKTISKAKGQPREPQVYTLPPSRDELTKNQVSLTCLVKGFYPSDIAVLWESLGHVWAVYKTTPPVLDSDGSFFLYSKLTVPKSTWQQGWVFSCSVMHEALHNHYTQKSLSLSPGK

SEQ ID NO: 23 - protein, 217 aa, Artificial Sequence
  source: /note="Description of Artificial Sequence: Synthetic polypeptide"
APELLGGPSVFLFPPKPKDTLMISRTPEVTCVVVDVSHEDPEVKFNWYVDGVEVHNAKTKPREEQYNSTYRVVSVLTVLHQDWLNGKEYKCKVSNKALPAPIEKTISKAKGQPREPQVYTLPPSRDELTKNQVSLTCLVKGFYPSDIAVYWESLGHVWAVYKTTPPVLDSDGSFFLYSKLTVPKSTWQQGWVFSCSVMHEALHNHYTQKSLSLSPGK

SEQ ID NO: 24 - protein, 217 aa, Artificial Sequence
  source: /note="Description of Artificial Sequence: Synthetic polypeptide"
APELLGGPSVFLFPPKPKDTLMISRTPEVTCVVVDVSHEDPEVKFNWYVDGVEVHNAKTKPREEQYNSTYRVVSVLTVLHQDWLNGKEYKCKVSNKALPAPIEKTISKAKGQPREPQVYTLPPSRDELTKNQVSLTCLVKGFYPSDIAVEWESLGHVWAVYQTTPPVLDSDGSFFLYSKLTVPKSTWQQGWVFSCSVMHEALHNHYTQKSLSLSPGK

SEQ ID NO: 25 - protein, 217 aa, Artificial Sequence
  source: /note="Description of Artificial Sequence: Synthetic polypeptide"
APELLGGPSVFLFPPKPKDTLMISRTPEVTCVVVDVSHEDPEVKFNWYVDGVEVHNAKTKPREEQYNSTYRVVSVLTVLHQDWLNGKEYKCKVSNKALPAPIEKTISKAKGQPREPQVYTLPPSRDELTKNQVSLTCLVKGFYPSDIAVEWESLGHVWAVYFTTPPVLDSDGSFFLYSKLTVPKSTWQQGWVFSCSVMHEALHNHYTQKSLSLSPGK

SEQ ID NO: 26 - protein, 217 aa, Artificial Sequence
  source: /note="Description of Artificial Sequence: Synthetic polypeptide"
APELLGGPSVFLFPPKPKDTLMISRTPEVTCVVVDVSHEDPEVKFNWYVDGVEVHNAKTKPREEQYNSTYRVVSVLTVLHQDWLNGKEYKCKVSNKALPAPIEKTISKAKGQPREPQVYTLPPSRDELTKNQVSLTCLVKGFYPSDIAVEWESLGHVWAVYHTTPPVLDSDGSFFLYSKLTVPKSTWQQGWVFSCSVMHEALHNHYTQKSLSLSPGK

SEQ ID NO: 27 - protein, 217 aa, Artificial Sequence; identical to SEQ ID NO: 21
  source: /note="Description of Artificial Sequence: Synthetic polypeptide"

SEQ ID NO: 28 - protein, 217 aa, Artificial Sequence; identical to SEQ ID NO: 24
  source: /note="Description of Artificial Sequence: Synthetic polypeptide"

SEQ ID NO: 29 - protein, 217 aa, Artificial Sequence
  source: /note="Description of Artificial Sequence: Synthetic polypeptide"
APELLGGPSVFLFPPKPKDTLMISRTPEVTCVVVDVSHEDPEVKFNWYVDGVEVHNAKTKPREEQYNSTYRVVSVLTVLHQDWLNGKEYKCKVSNKALPAPIEKTISKAKGQPREPQVYTLPPSRDELTKNQVSLTCLVKGFYPSDIAVWWESLGHVWAVYQTTPPVLDSDGSFFLYSKLTVPKSTWQQGWVFSCSVMHEALHNHYTQKSLSLSPGK

SEQ ID NO: 30 - protein, 217 aa, Artificial Sequence
  source: /note="Description of Artificial Sequence: Synthetic polypeptide"
APELLGGPSVFLFPPKPKDTLMISRTPEVTCVVVDVSHEDPEVKFNWYVDGVEVHNAKTKPREEQYNSTYRVVSVLTVLHQDWLNGKEYKCKVSNKALPAPIEKTISKAKGQPREPQVYTLPPSRDELTKNQVSLTCLVKGFYPSDIAVWWESLGHVWVNQKTTPPVLDSDGSFFLYSKLTVPKSTWQQGWVFSCSVMHEALHNHYTQKSLSLSPGK

SEQ ID NO: 31 - protein, 217 aa, Artificial Sequence
  source: /note="Description of Artificial Sequence: Synthetic polypeptide"
APELLGGPSVFLFPPKPKDTLMISRTPEVTCVVVDVSHEDPEVKFNWYVDGVEVHNAKTKPREEQYNSTYRVVSVLTVLHQDWLNGKEYKCKVSNKALPAPIEKTISKAKGQPREPQVYTLPPSRDELTKNQVSLTCLVKGFYPSDIAVEWESLGHVWVNQQTTPPVLDSDGSFFLYSKLTVPKSTWQQGWVFSCSVMHEALHNHYTQKSLSLSPGK

SEQ ID NO: 32 - protein, 217 aa, Artificial Sequence
  source: /note="Description of Artificial Sequence: Synthetic polypeptide"
APELLGGPSVFLFPPKPKDTLMISRTPEVTCVVVDVSHEDPEVKFNWYVDGVEVHNAKTKPREEQYNSTYRVVSVLTVLHQDWLNGKEYKCKVSNKALPAPIEKTISKAKGQPREPQVYTLPPSRDELTKNQVSLTCLVKGFYPSDIAVWWESLGHVWVNQQTTPPVLDSDGSFFLYSKLTVPKSTWQQGWVFSCSVMHEALHNHYTQKSLSLSPGK

SEQ ID NO: 33 - protein, 217 aa, Artificial Sequence
  source: /note="Description of Artificial Sequence: Synthetic polypeptide"
APELLGGPSVFLFPPKPKDTLMISRTPEVTCVVVDVSHEDPEVKFNWYVDGVEVHNAKTKPREEQYNSTYRVVSVLTVLHQDWLNGKEYKCKVSNKALPAPIEKTISKAKGQPREPQVYTLPPSRDELTKNQVSLTCLVKGFYPSDIAVWWESYGTEWSSYKTTPPVLDSDGSFFLYSKLTVTKSEWQQGFVFSCSVMHEALHNHYTQKSLSLSPGK

SEQ ID NO: 34 - protein, 217 aa, Artificial Sequence
  source: /note="Description of Artificial Sequence: Synthetic polypeptide"
APELLGGPSVFLFPPKPKDTLMISRTPEVTCVVVDVSHEDPEVKFNWYVDGVEVHNAKTKPREEQYNSTYRVVSVLTVLHQDWLNGKEYKCKVSNKALPAPIEKTISKAKGQPREPQVYTLPPSRDELTKNQVSLTCLVKGFYPSDIAVEWESYGTEWSSYKTTPPVLDSDGSFFLYSKLTVTKEEWQQGFVFSCSVMHEALHNHYTQKSLSLSPGK

SEQ ID NO: 35 - protein, 217 aa, Artificial Sequence
  source: /note="Description of Artificial Sequence: Synthetic polypeptide"
APELLGGPSVFLFPPKPKDTLMISRTPEVTCVVVDVSHEDPEVKFNWYVDGVEVHNAKTKPREEQYNSTYRVVSVLTVLHQDWLNGKEYKCKVSNKALPAPIEKTISKAKGQPREPQVYTLPPSRDELTKNQVSLTCLVKGFYPSDIAVWWESYGTEWSSYKTTPPVLDSDGSFFLYSKLTVTKEEWQQGFVFSCSVMHEALHNHYTQKSLSLSPGK

SEQ ID NO: 36 - protein, 217 aa, Artificial Sequence
  source: /note="Description of Artificial Sequence: Synthetic polypeptide"
APELLGGPSVFLFPPKPKDTLMISRTPEVTCVVVDVSHEDPEVKFNWYVDGVEVHNAKTKPREEQYNSTYRVVSVLTVLHQDWLNGKEYKCKVSNKALPAPIEKTISKAKGQPREPQVYTLPPSRDELTKNQVSLTCLVKGFYPSDIAVWWESYGTEWSNYKTTPPVLDSDGSFFLYSKLTVTKSEWQQGFVFSCSVMHEALHNHYTQKSLSLSPGK

SEQ ID NO: 37 - protein, 217 aa, Artificial Sequence
  source: /note="Description of Artificial Sequence: Synthetic polypeptide"
APELLGGPSVFLFPPKPKDTLMISRTPEVTCVVVDVSHEDPEVKFNWYVDGVEVHNAKTKPREEQYNSTYRVVSVLTVLHQDWLNGKEYKCKVSNKALPAPIEKTISKAKGQPREPQVYTLPPSRDELTKNQVSLTCLVKGFYPSDIAVEWESYGTEWSNYKTTPPVLDSDGSFFLYSKLTVTKEEWQQGFVFSCSVMHEALHNHYTQKSLSLSPGK

SEQ ID NO: 38 - protein, 217 aa, Artificial Sequence
  source: /note="Description of Artificial Sequence: Synthetic polypeptide"
APELLGGPSVFLFPPKPKDTLMISRTPEVTCVVVDVSHEDPEVKFNWYVDGVEVHNAKTKPREEQYNSTYRVVSVLTVLHQDWLNGKEYKCKVSNKALPAPIEKTISKAKGQPREPQVYTLPPSRDELTKNQVSLTCLVKGFYPSDIAVWWESYGTEWSNYKTTPPVLDSDGSFFLYSKLTVTKEEWQQGFVFSCSVMHEALHNHYTQKSLSLSPGK

SEQ ID NO: 39 - protein, 217 aa, Artificial Sequence
  source: /note="Description of Artificial Sequence: Synthetic polypeptide"
APELLGGPSVFLFPPKPKDTLMISRTPEVTCVVVDVSHEDPEVKFNWYVDGVEVHNAKTKPREEQYNSTYRVVSVLTVLHQDWLNGKEYKCKVSNKALPAPIEKTISKAKGQPREPQVYTLPPSRDELTKNQVSLTCLVKGFYPSDIAVEWESYGTEWSNYKTTPPVLDSDGSFFLYSKLTVTKSEWQQGFVFSCSVMHEALHNHYTQKSLSLSPGK

SEQ ID NO: 40 - protein, 217 aa, Artificial Sequence
  source: /note="Description of Artificial Sequence: Synthetic polypeptide"
APELLGGPSVFLFPPKPKDTLMISRTPEVTCVVVDVSHEDPEVKFNWYVDGVEVHNAKTKPREEQYNSTYRVVSVLTVLHQDWLNGKEYKCKVSNKALPAPIEKTISKAKGQPREPQVYTLPPSRDELTKNQVSLTCLVKGFYPSDIAVEWESYGTEWSSYQTTPPVLDSDGSFFLYSKLTVTKSEWQQGFVFSCSVMHEALHNHYTQKSLSLSPGK

SEQ ID NO: 41 - protein, 217 aa, Artificial Sequence
  source: /note="Description of Artificial Sequence: Synthetic polypeptide"
APELLGGPSVFLFPPKPKDTLMISRTPEVTCVVVDVSHEDPEVKFNWYVDGVEVHNAKTKPREEQYNSTYRVVSVLTVLHQDWLNGKEYKCKVSNKALPAPIEKTISKAKGQPREPQVYTLPPSRDELTKNQVSLTCLVKGFYPSDIAVEWESYGTEWSNYQTTPPVLDSDGSFFLYSKLTVTKSEWQQGFVFSCSVMHEALHNHYTQKSLSLSPGK

SEQ ID NO: 42 - protein, 217 aa, Artificial Sequence
  source: /note="Description of Artificial Sequence: Synthetic polypeptide"
APELLGGPSVFLFPPKPKDTLMISRTPEVTCVVVDVSHEDPEVKFNWYVDGVEVHNAKTKPREEQYNSTYRVVSVLTVLHQDWLNGKEYKCKVSNKALPAPIEKTISKAKGQPREPQVYTLPPSRDELTKNQVSLTCLVKGFYPSDIAVLWESYGTEWSSYKTTPPVLDSDGSFFLYSKLTVTKSEWQQGFVFSCSVMHEALHNHYTQKSLSLSPGK

SEQ ID NO: 43 - protein, 217 aa, Artificial Sequence
  source: /note="Description of Artificial Sequence: Synthetic polypeptide"
APELLGGPSVFLFPPKPKDTLMISRTPEVTCVVVDVSHEDPEVKFNWYVDGVEVHNAKTKPREEQYNSTYRVVSVLTVLHQDWLNGKEYKCKVSNKALPAPIEKTISKAKGQPREPQVYTLPPSRDELTKNQVSLTCLVKGFYPSDIAVLWESYGTEWSSYRTTPPVLDSDGSFFLYSKLTVTKSEWQQGFVFSCSVMHEALHNHYTQKSLSLSPGK

SEQ ID NO: 44 - protein, 217 aa, Artificial Sequence
  source: /note="Description of Artificial Sequence: Synthetic polypeptide"
APELLGGPSVFLFPPKPKDTLMISRTPEVTCVVVDVSHEDPEVKFNWYVDGVEVHNAKTKPREEQYNSTYRVVSVLTVLHQDWLNGKEYKCKVSNKALPAPIEKTISKAKGQPREPQVYTLPPSRDELTKNQVSLTCLVKGFYPSDIAVLWESYGTEWSSYRTTPPVLDSDGSFFLYSKLTVTREEWQQGFVFSCSVMHEALHNHYTQKSLSLSPGK

SEQ ID NO: 45 - protein, 217 aa, Artificial Sequence
  source: /note="Description of Artificial Sequence: Synthetic polypeptide"
APELLGGPSVFLFPPKPKDTLMISRTPEVTCVVVDVSHEDPEVKFNWYVDGVEVHNAKTKPREEQYNSTYRVVSVLTVLHQDWLNGKEYKCKVSNKALPAPIEKTISKAKGQPREPQVYTLPPSRDELTKNQVSLTCLVKGFYPSDIAVLWESYGTEWSSYRTTPPVLDSDGSFFLYSKLTVTGEEWQQGFVFSCSVMHEALHNHYTQKSLSLSPGK

SEQ ID NO: 46 - protein, 217 aa, Artificial Sequence
  source: /note="Description of Artificial Sequence: Synthetic polypeptide"
APELLGGPSVFLFPPKPKDTLMISRTPEVTCVVVDVSHEDPEVKFNWYVDGVEVHNAKTKPREEQYNSTYRVVSVLTVLHQDWLNGKEYKCKVSNKALPAPIEKTISKAKGQPREPQVYTLPPSRDELTKNQVSLTCLVKGFYPSDIAVLWESYGTEWSSYRTTPPVLDSDGSFFLYSKLTVTREEWQQGFVFSCWVMHEALHNHYTQKSLSLSPGK

SEQ ID NO: 47 - protein, 217 aa, Artificial Sequence
  source: /note="Description of Artificial Sequence: Synthetic polypeptide"
APELLGGPSVFLFPPKPKDTLMISRTPEVTCVVVDVSHEDPEVKFNWYVDGVEVHNAKTKPREEQYNSTYRVVSVLTVLHQDWLNGKEYKCKVSNKALPAPIEKTISKAKGQPREPQVYTLPPSRDELTKNQVSLTCLVKGFYPSDIAVLWESYGTEWSSYRTTPPVLDSDGSFFLYSKLTVTKEEWQQGFVFSCWVMHEALHNHYTQKSLSLSPGK

SEQ ID NO: 48 - protein, 217 aa, Artificial Sequence
  source: /note="Description of Artificial Sequence: Synthetic polypeptide"
APELLGGPSVFLFPPKPKDTLMISRTPEVTCVVVDVSHEDPEVKFNWYVDGVEVHNAKTKPREEQYNSTYRVVSVLTVLHQDWLNGKEYKCKVSNKALPAPIEKTISKAKGQPREPQVYTLPPSRDELTKNQVSLTCLVKGFYPSDIAVLWESYGTEWSSYRTTPPVLDSDGSFFLYSKLTVTREEWQQGFVFTCWVMHEALHNHYTQKSLSLSPGK

SEQ ID NO: 49 - protein, 217 aa, Artificial Sequence
  source: /note="Description of Artificial Sequence: Synthetic polypeptide"
APELLGGPSVFLFPPKPKDTLMISRTPEVTCVVVDVSHEDPEVKFNWYVDGVEVHNAKTKPREEQYNSTYRVVSVLTVLHQDWLNGKEYKCKVSNKALPAPIEKTISKAKGQPREPQVYTLPPSRDELTKNQVSLTCLVKGFYPSDIAVLWESYGTEWSSYRTTPPVLDSDGSFFLYSKLTVTREEWQQGFVFTCGVMHEALHNHYTQKSLSLSPGK

SEQ ID NO: 50 - protein, 217 aa, Artificial Sequence
  source: /note="Description of Artificial Sequence: Synthetic polypeptide"
APELLGGPSVFLFPPKPKDTLMISRTPEVTCVVVDVSHEDPEVKFNWYVDGVEVHNAKTKPREEQYNSTYRVVSVLTVLHQDWLNGKEYKCKVSNKALPAPIEKTISKAKGQPREPQVYTLPPSRDELTKNQVSLTCLVKGFYPSDIAVLWESYGTEWSSYRTTPPVLDSDGSFFLYSKLTVTREEWQQGFVFECWVMHEALHNHYTQKSLSLSPGK

SEQ ID NO: 51 - protein, 217 aa, Artificial Sequence
  source: /note="Description of Artificial Sequence: Synthetic polypeptide"
APELLGGPSVFLFPPKPKDTLMISRTPEVTCVVVDVSHEDPEVKFNWYVDGVEVHNAKTKPREEQYNSTYRVVSVLTVLHQDWLNGKEYKCKVSNKALPAPIEKTISKAKGQPREPQVYTLPPSRDELTKNQVSLTCLVKGFYPSDIAVLWESYGTEWSSYRTTPPVLDSDGSFFLYSKLTVTREEWQQGFVFKCWVMHEALHNHYTQKSLSLSPGK

SEQ ID NO: 52 - protein, 217 aa, Artificial Sequence
  source: /note="Description of Artificial Sequence: Synthetic polypeptide"
APELLGGPSVFLFPPKPKDTLMISRTPEVTCVVVDVSHEDPEVKFNWYVDGVEVHNAKTKPREEQYNSTYRVVSVLTVLHQDWLNGKEYKCKVSNKALPAPIEKTISKAKGQPREPQVYTLPPSRDELTKNQVSLTCLVKGFYPSDIAVLWESYGTEWSSYRTTPPVLDSDGSFFLYSKLTVTPEEWQQGFVFKCWVMHEALHNHYTQKSLSLSPGK

SEQ ID NO: 53 - protein, 217 aa, Artificial Sequence
  source: /note="Description of Artificial Sequence: Synthetic polypeptide"
APELLGGPSVFLFPPKPKDTLMISRTPEVTCVVVDVSHEDPEVKFNWYVDGVEVHNAKTKPREEQYNSTYRVVSVLTVLHQDWLNGKEYKCKVSNKALPAPIEKTISKAKGQPREPQVYTLPPSRDELTKNQVSLTCLVKGFYPSDIAVWWESYGTEWSSYRTTPPVLDSDGSFFLYSKLTVTREEWQQGFVFSCSVMHEALHNHYTQKSLSLSPGK

SEQ ID NO: 54 - protein, 217 aa, Artificial Sequence
  source: /note="Description of Artificial Sequence: Synthetic polypeptide"
APELLGGPSVFLFPPKPKDTLMISRTPEVTCVVVDVSHEDPEVKFNWYVDGVEVHNAKTKPREEQYNSTYRVVSVLTVLHQDWLNGKEYKCKVSNKALPAPIEKTISKAKGQPREPQVYTLPPSRDELTKNQVSLTCLVKGFYPSDIAVWWESYGTEWSSYRTTPPVLDSDGSFFLYSKLTVTGEEWQQGFVFSCSVMHEALHNHYTQKSLSLSPGK

SEQ ID NO: 55 - protein, 217 aa, Artificial Sequence
  source: /note="Description of Artificial Sequence: Synthetic polypeptide"
APELLGGPSVFLFPPKPKDTLMISRTPEVTCVVVDVSHEDPEVKFNWYVDGVEVHNAKTKPREEQYNSTYRVVSVLTVLHQDWLNGKEYKCKVSNKALPAPIEKTISKAKGQPREPQVYTLPPSRDELTKNQVSLTCLVKGFYPSDIAVWWESYGTEWSSYRTTPPVLDSDGSFFLYSKLTVTREEWQQGFVFTCWVMHEALHNHYTQKSLSLSPGK

SEQ ID NO: 56 - protein, 217 aa, Artificial Sequence
  source: /note="Description of Artificial Sequence: Synthetic polypeptide"
APELLGGPSVFLFPPKPKDTLMISRTPEVTCVVVDVSHEDPEVKFNWYVDGVEVHNAKTKPREEQYNSTYRVVSVLTVLHQDWLNGKEYKCKVSNKALPAPIEKTISKAKGQPREPQVYTLPPSRDELTKNQVSLTCLVKGFYPSDIAVWWESYGTEWSSYRTTPPVLDSDGSFFLYSKLTVTGEEWQQGFVFTCWVMHEALHNHYTQKSLSLSPGK

SEQ ID NO: 57 - protein, 217 aa, Artificial Sequence
  source: /note="Description of Artificial Sequence: Synthetic polypeptide"
APELLGGPSVFLFPPKPKDTLMISRTPEVTCVVVDVSHEDPEVKFNWYVDGVEVHNAKTKPREEQYNSTYRVVSVLTVLHQDWLNGKEYKCKVSNKALPAPIEKTISKAKGQPREPQVYTLPPSRDELTKNQVSLTCLVKGFYPSDIAVWWESYGTEWSSYRTTPPVLDSDGSFFLYSKLTVTREEWQQGFVFTCGVMHEALHNHYTQKSLSLSPGK

SEQ ID NO: 58 - protein, 217 aa, Artificial Sequence
  source: /note="Description of Artificial Sequence: Synthetic polypeptide"
APELLGGPSVFLFPPKPKDTLMISRTPEVTCVVVDVSHEDPEVKFNWYVDGVEVHNAKTKPREEQYNSTYRVVSVLTVLHQDWLNGKEYKCKVSNKALPAPIEKTISKAKGQPREPQVYTLPPSRDELTKNQVSLTCLVKGFYPSDIAVLWESYGTEWSSYKTTPPVLDSDGSFFLYSKLTVTKEEWQQGFVFSCSVMHEALHNHYTQKSLSLSPGK

SEQ ID NO: 59 - protein, 217 aa, Artificial Sequence
  source: /note="Description of Artificial Sequence: Synthetic polypeptide"
APELLGGPSVFLFPPKPKDTLMISRTPEVTCVVVDVSHEDPEVKFNWYVDGVEVHNAKTKPREEQYNSTYRVVSVLTVLHQDWLNGKEYKCKVSNKALPAPIEKTISKAKGQPREPQVYTLPPSRDELTKNQVSLTCLVKGFYPSDIAVLWESYGTEWSSYRTTPPVLDSDGSFFLYSKLTVTKEEWQQGFVFSCSVMHEALHNHYTQKSLSLSPGK

SEQ ID NO: 60 - protein, 217 aa, Artificial Sequence
  source: /note="Description of Artificial Sequence: Synthetic polypeptide"
APELLGGPSVFLFPPKPKDTLMISRTPEVTCVVVDVSHEDPEVKFNWYVDGVEVHNAKTKPREEQYNSTYRVVSVLTVLHQDWLNGKEYKCKVSNKALPAPIEKTISKAKGQPREPQVYTLPPSRDELTKNQVSLTCLVKGFYPSDIAVEWESFGTEWSSYKTTPPVLDSDGSFFLYSKLTVTKEEWQQGFVFSCSVMHEALHNHYTQKSLSLSPGK

SEQ ID NO: 61 - protein, 217 aa, Artificial Sequence
  source: /note="Description of Artificial Sequence: Synthetic polypeptide"
APELLGGPSVFLFPPKPKDTLMISRTPEVTCVVVDVSHEDPEVKFNWYVDGVEVHNAKTKPREEQYNSTYRVVSVLTVLHQDWLNGKEYKCKVSNKALPAPIEKTISKAKGQPREPQVYTLPPSRDELTKNQVSLTCLVKGFYPSDIAVEWESYGTEWASYKTTPPVLDSDGSFFLYSKLTVTKEEWQQGFVFSCSVMHEALHNHYTQKSLSLSPGK

SEQ ID NO: 62 - protein, 217 aa, Artificial Sequence
  source: /note="Description of Artificial Sequence: Synthetic polypeptide"
APELLGGPSVFLFPPKPKDTLMISRTPEVTCVVVDVSHEDPEVKFNWYVDGVEVHNAKTKPREEQYNSTYRVVSVLTVLHQDWLNGKEYKCKVSNKALPAPIEKTISKAKGQPREPQVYTLPPSRDELTKNQVSLTCLVKGFYPSDIAVEWESYGTEWVSYKTTPPVLDSDGSFFLYSKLTVTKEEWQQGFVFSCSVMHEALHNHYTQKSLSLSPGK

SEQ ID NO: 63 - protein, 217 aa, Artificial Sequence
  source: /note="Description of Artificial Sequence: Synthetic polypeptide"
APELLGGPSVFLFPPKPKDTLMISRTPEVTCVVVDVSHEDPEVKFNWYVDGVEVHNAKTKPREEQYNSTYRVVSVLTVLHQDWLNGKEYKCKVSNKALPAPIEKTISKAKGQPREPQVYTLPPSRDELTKNQVSLTCLVKGFYPSDIAVEWESYGTEWSSYKTTPPVLDSDGSFFLYSKLTVSKEEWQQGFVFSCSVMHEALHNHYTQKSLSLSPGK

SEQ ID NO: 64 - protein, 217 aa, Artificial Sequence
  source: /note="Description of Artificial Sequence: Synthetic polypeptide"
APELLGGPSVFLFPPKPKDTLMISRTPEVTCVVVDVSHEDPEVKFNWYVDGVEVHNAKTKPREEQYNSTYRVVSVLTVLHQDWLNGKEYKCKVSNKALPAPIEKTISKAKGQPREPQVYTLPPSRDELTKNQVSLTCLVKGFYPSDIAVEWESFGTEWASYKTTPPVLDSDGSFFLYSKLTVTKEEWQQGFVFSCSVMHEALHNHYTQKSLSLSPGK

SEQ ID NO: 65 - protein, 217 aa, Artificial Sequence
  source: /note="Description of Artificial Sequence: Synthetic polypeptide"
APELLGGPSVFLFPPKPKDTLMISRTPEVTCVVVDVSHEDPEVKFNWYVDGVEVHNAKTKPREEQYNSTYRVVSVLTVLHQDWLNGKEYKCKVSNKALPAPIEKTISKAKGQPREPQVYTLPPSRDELTKNQVSLTCLVKGFYPSDIAVEWESFGTEWVSYKTTPPVLDSDGSFFLYSKLTVTKEEWQQGFVFSCSVMHEALHNHYTQKSLSLSPGK

SEQ ID NO: 66 - protein, 217 aa, Artificial Sequence
  source: /note="Description of Artificial Sequence: Synthetic polypeptide"
APELLGGPSVFLFPPKPKDTLMISRTPEVTCVVVDVSHEDPEVKFNWYVDGVEVHNAKTKPREEQYNSTYRVVSVLTVLHQDWLNGKEYKCKVSNKALPAPIEKTISKAKGQPREPQVYTLPPSRDELTKNQVSLTCLVKGFYPSDIAVWWESFGTEWSSYKTTPPVLDSDGSFFLYSKLTVTKEEWQQGFVFSCSVMHEALHNHYTQKSLSLSPGK

SEQ ID NO: 67 - protein, 217 aa, Artificial Sequence
  source: /note="Description of Artificial Sequence: Synthetic polypeptide"
APELLGGPSVFLFPPKPKDTLMISRTPEVTCVVVDVSHEDPEVKFNWYVDGVEVHNAKTKPREEQYNSTYRVVSVLTVLHQDWLNGKEYKCKVSNKALPAPIEKTISKAKGQPREPQVYTLPPSRDELTKNQVSLTCLVKGFYPSDIAVWWESYGTEWASYKTTPPVLDSDGSFFLYSKLTVTKEEWQQGFVFSCSVMHEALHNHYTQKSLSLSPGK

SEQ ID NO: 68 - protein, 217 aa, Artificial Sequence
  source: /note="Description of Artificial Sequence: Synthetic polypeptide"
APELLGGPSVFLFPPKPKDTLMISRTPEVTCVVVDVSHEDPEVKFNWYVDGVEVHNAKTKPREEQYNSTYRVVSVLTVLHQDWLNGKEYKCKVSNKALPAPIEKTISKAKGQPREPQVYTLPPSRDELTKNQVSLTCLVKGFYPSDIAVWWESYGTEWVSYKTTPPVLDSDGSFFLYSKLTVTKEEWQQGFVFSCSVMHEALHNHYTQKSLSLSPGK

SEQ ID NO: 69 - protein, 217 aa, Artificial Sequence
  source: /note="Description of Artificial Sequence: Synthetic polypeptide"
APELLGGPSVFLFPPKPKDTLMISRTPEVTCVVVDVSHEDPEVKFNWYVDGVEVHNAKTKPREEQYNSTYRVVSVLTVLHQDWLNGKEYKCKVSNKALPAPIEKTISKAKGQPREPQVYTLPPSRDELTKNQVSLTCLVKGFYPSDIAVWWESYGTEWSSYKTTPPVLDSDGSFFLYSKLTVSKEEWQQGFVFSCSVMHEALHNHYTQKSLSLSPGK

SEQ ID NO: 70 - protein, 217 aa, Artificial Sequence
  source: /note="Description of Artificial Sequence: Synthetic polypeptide"
APELLGGPSVFLFPPKPKDTLMISRTPEVTCVVVDVSHEDPEVKFNWYVDGVEVHNAKTKPREEQYNSTYRVVSVLTVLHQDWLNGKEYKCKVSNKALPAPIEKTISKAKGQPREPQVYTLPPSRDELTKNQVSLTCLVKGFYPSDIAVWWESFGTEWASYKTTPPVLDSDGSFFLYSKLTVTKEEWQQGFVFSCSVMHEALHNHYTQKSLSLSPGK

SEQ ID NO: 71 - protein, 217 aa, Artificial Sequence
  source: /note="Description of Artificial Sequence: Synthetic polypeptide"
APELLGGPSVFLFPPKPKDTLMISRTPEVTCVVVDVSHEDPEVKFNWYVDGVEVHNAKTKPREEQYNSTYRVVSVLTVLHQDWLNGKEYKCKVSNKALPAPIEKTISKAKGQPREPQVYTLPPSRDELTKNQVSLTCLVKGFYPSDIAVWWESFGTEWVSYKTTPPVLDSDGSFFLYSKLTVTKEEWQQGFVFSCSVMHEALHNHYTQKSLSLSPGK

SEQ ID NO: 72 - protein, 217 aa, Artificial Sequence
  source: /note="Description of Artificial Sequence: Synthetic polypeptide"
APELLGGPSVFLFPPKPKDTLMISRTPEVTCVVVDVSHEDPEVKFNWYVDGVEVHNAKTKPREEQYNSTYRVVSVLTVLHQDWLNGKEYKCKVSNKALPAPIEKTISKAKGQPREPQVYTLPPSRDELTKNQVSLTCLVKGFYPSDIAVEWESFGTEWSNYKTTPPVLDSDGSFFLYSKLTVTKEEWQQGFVFSCSVMHEALHNHYTQKSLSLSPGK

SEQ ID NO: 73 - protein, 217 aa, Artificial Sequence
  source: /note="Description of Artificial Sequence: Synthetic polypeptide"
APELLGGPSVFLFPPKPKDTLMISRTPEVTCVVVDVSHEDPEVKFNWYVDGVEVHNAKTKPREEQYNSTYRVVSVLTVLHQDWLNGKEYKCKVSNKALPAPIEKTISKAKGQPREPQVYTLPPSRDELTKNQVSLTCLVKGFYPSDIAVEWESYGTEWANYKTTPPVLDSDGSFFLYSKLTVTKEEWQQGFVFSCSVMHEALHNHYTQKSLSLSPGK

SEQ ID NO: 74 - protein, 217 aa, Artificial Sequence
  source: /note="Description of Artificial Sequence: Synthetic polypeptide"
APELLGGPSVFLFPPKPKDTLMISRTPEVTCVVVDVSHEDPEVKFNWYVDGVEVHNAKTKPREEQYNSTYRVVSVLTVLHQDWLNGKEYKCKVSNKALPAPIEKTISKAKGQPREPQVYTLPPSRDELTKNQVSLTCLVKGFYPSDIAVEWESYGTEWVNYKTTPPVLDSDGSFFLYSKLTVTKEEWQQGFVFSCSVMHEALHNHYTQKSLSLSPGK

SEQ ID NO: 75 - protein, 217 aa, Artificial Sequence
  source: /note="Description of Artificial Sequence: Synthetic polypeptide"
APELLGGPSVFLFPPKPKDTLMISRTPEVTCVVVDVSHEDPEVKFNWYVDGVEVHNAKTKPREEQYNSTYRVVSVLTVLHQDWLNGKEYKCKVSNKALPAPIEKTISKAKGQPREPQVYTLPPSRDELTKNQVSLTCLVKGFYPSDIAVEWESYGTEWSNYKTTPPVLDSDGSFFLYSKLTVSKEEWQQGFVFSCSVMHEALHNHYTQKSLSLSPGK

SEQ ID NO: 76 - protein, 217 aa, Artificial Sequence
  source: /note="Description of Artificial Sequence: Synthetic polypeptide"
APELLGGPSVFLFPPKPKDTLMISRTPEVTCVVVDVSHEDPEVKFNWYVDGVEVHNAKTKPREEQYNSTYRVVSVLTVLHQDWLNGKEYKCKVSNKALPAPIEKTISKAKGQPREPQVYTLPPSRDELTKNQVSLTCLVKGFYPSDIAVEWESFGTEWANYKTTPPVLDSDGSFFLYSKLTVTKEEWQQGFVFSCSVMHEALHNHYTQKSLSLSPGK

SEQ ID NO: 77 - protein, 217 aa, Artificial Sequence
  source: /note="Description of Artificial Sequence: Synthetic polypeptide"
APELLGGPSVFLFPPKPKDTLMISRTPEVTCVVVDVSHEDPEVKFNWYVDGVEVHNAKTKPREEQYNSTYRVVSVLTVLHQDWLNGKEYKCKVSNKALPAPIEKTISKAKGQPREPQVYTLPPSRDELTKNQVSLTCLVKGFYPSDIAVEWESFGTEWVNYKTTPPVLDSDGSFFLYSKLTVTKEEWQQGFVFSCSVMHEALHNHYTQKSLSLSPGK

SEQ ID NO: 78 - protein, 217 aa, Artificial Sequence
  source: /note="Description of Artificial Sequence: Synthetic polypeptide"
APELLGGPSVFLFPPKPKDTLMISRTPEVTCVVVDVSHEDPEVKFNWYVDGVEVHNAKTKPREEQYNSTYRVVSVLTVLHQDWLNGKEYKCKVSNKALPAPIEKTISKAKGQPREPQVYTLPPSRDELTKNQVSLTCLVKGFYPSDIAVWWESFGTEWSNYKTTPPVLDSDGSFFLYSKLTVTKEEWQQGFVFSCSVMHEALHNHYTQKSLSLSPGK

SEQ ID NO: 79 - protein, 217 aa, Artificial Sequence
  source: /note="Description of Artificial Sequence: Synthetic polypeptide"
APELLGGPSVFLFPPKPKDTLMISRTPEVTCVVVDVSHEDPEVKFNWYVDGVEVHNAKTKPREEQYNSTYRVVSVLTVLHQDWLNGKEYKCKVSNKALPAPIEKTISKAKGQPREPQVYTLPPSRDELTKNQVSLTCLVKGFYPSDIAVWWESYGTEWANYKTTPPVLDSDGSFFLYSKLTVTKEEWQQGFVFSCSVMHEALHNHYTQKSLSLSPGK

SEQ ID NO: 80 - protein, 217 aa, Artificial Sequence
  source: /note="Description of Artificial Sequence: Synthetic polypeptide"
APELLGGPSVFLFPPKPKDTLMISRTPEVTCVVVDVSHEDPEVKFNWYVDGVEVHNAKTKPREEQYNSTYRVVSVLTVLHQDWLNGKEYKCKVSNKALPAPIEKTISKAKGQPREPQVYTLPPSRDELTKNQVSLTCLVKGFYPSDIAVWWESYGTEWVNYKTTPPVLDSDGSFFLYSKLTVTKEEWQQGFVFSCSVMHEALHNHYTQKSLSLSPGK

SEQ ID NO: 81 - protein, 217 aa, Artificial Sequence
  source: /note="Description of Artificial Sequence: Synthetic polypeptide"
APELLGGPSVFLFPPKPKDTLMISRTPEVTCVVVDVSHEDPEVKFNWYVDGVEVHNAKTKPREEQYNSTYRVVSVLTVLHQDWLNGKEYKCKVSNKALPAPIEKTISKAKGQPREPQVYTLPPSRDELTKNQVSLTCLVKGFYPSDIAVWWESYGTEWSNYKTTPPVLDSDGSFFLYSKLTVSKEEWQQGFVFSCSVMHEALHNHYTQKSLSLSPGK

SEQ ID NO: 82 - protein, 217 aa, Artificial Sequence
  source: /note="Description of Artificial Sequence: Synthetic polypeptide"
APELLGGPSVFLFPPKPKDTLMISRTPEVTCVVVDVSHEDPEVKFNWYVDGVEVHNAKTKPREEQYNSTYRVVSVLTVLHQDWLNGKEYKCKVSNKALPAPIEKTISKAKGQPREPQVYTLPPSRDELTKNQVSLTCLVKGFYPSDIAVWWESFGTEWANYKTTPPVLDSDGSFFLYSKLTVTKEEWQQGFVFSCSVMHEALHNHYTQKSLSLSPGK

SEQ ID NO: 83 - protein, 217 aa, Artificial Sequence
  source: /note="Description of Artificial Sequence: Synthetic polypeptide"
APELLGGPSVFLFPPKPKDTLMISRTPEVTCVVVDVSHEDPEVKFNWYVDGVEVHNAKTKPREEQYNSTYRVVSVLTVLHQDWLNGKEYKCKVSNKALPAPIEKTISKAKGQPREPQVYTLPPSRDELTKNQVSLTCLVKGFYPSDIAVWWESFGTEWVNYKTTPPVLDSDGSFFLYSKLTVTKEEWQQGFVFSCSVMHEALHNHYTQKSLSLSPGK

SEQ ID NO: 84 - protein, 217 aa, Artificial Sequence
  source: /note="Description of Artificial Sequence: Synthetic polypeptide"
APELLGGPSVFLFPPKPKDTLMISRTPEVTCVVVDVSHEDPEVKFNWYVDGVEVHNAKTKPREEQYNSTYRVVSVLTVLHQDWLNGKEYKCKVSNKALPAPIEKTISKAKGQPREPQVYTLPPSRDELTKNQVSLTCLVKGFYPSDIAVLWESFGTEWSSYKTTPPVLDSDGSFFLYSKLTVTKEEWQQGFVFSCSVMHEALHNHYTQKSLSLSPGK

SEQ ID NO: 85 - protein, 217 aa, Artificial Sequence
  source: /note="Description of Artificial Sequence: Synthetic polypeptide"
APELLGGPSVFLFPPKPKDTLMISRTPEVTCVVVDVSHEDPEVKFNWYVDGVEVHNAKTKPREEQYNSTYRVVSVLTVLHQDWLNGKEYKCKVSNKALPAPIEKTISKAKGQPREPQVYTLPPSRDELTKNQVSLTCLVKGFYPSDIAVLWESYGTEWASYKTTPPVLDSDGSFFLYSKLTVTKEEWQQGFVFSCSVMHEALHNHYTQKSLSLSPGK

SEQ ID NO: 86 - protein, 217 aa, Artificial Sequence
  source: /note="Description of Artificial Sequence: Synthetic polypeptide"
APELLGGPSVFLFPPKPKDTLMISRTPEVTCVVVDVSHEDPEVKFNWYVDGVEVHNAKTKPREEQYNSTYRVVSVLTVLHQDWLNGKEYKCKVSNKALPAPIEKTISKAKGQPREPQVYTLPPSRDELTKNQVSLTCLVKGFYPSDIAVLWESYGTEWVSYKTTPPVLDSDGSFFLYSKLTVTKEEWQQGFVFSCSVMHEALHNHYTQKSLSLSPGK

SEQ ID NO: 87 - protein, 217 aa, Artificial Sequence
  source: /note="Description of Artificial Sequence: Synthetic polypeptide"
APELLGGPSVFLFPPKPKDTLMISRTPEVTCVVVDVSHEDPEVKFNWYVDGVEVHNAKTKPREEQYNSTYRVVSVLTVLHQDWLNGKEYKCKVSNKALPAPIEKTISKAKGQPREPQVYTLPPSRDELTKNQVSLTCLVKGFYPSDIAVLWESYGTEWSSYKTTPPVLDSDGSFFLYSKLTVSKEEWQQGFVFSCSVMHEALHNHYTQKSLSLSPGK

SEQ ID NO: 88 - protein, 217 aa, Artificial Sequence
  source: /note="Description of Artificial Sequence: Synthetic polypeptide"
APELLGGPSVFLFPPKPKDTLMISRTPEVTCVVVDVSHEDPEVKFNWYVDGVEVHNAKTKPREEQYNSTYRVVSVLTVLHQDWLNGKEYKCKVSNKALPAPIEKTISKAKGQPREPQVYTLPPSRDELTKNQVSLTCLVKGFYPSDIAVLWESFGTEWASYKTTPPVLDSDGSFFLYSKLTVTKEEWQQGFVFSCSVMHEALHNHYTQKSLSLSPGK

SEQ ID NO: 89 - protein, 217 aa, Artificial Sequence
  source: /note="Description of Artificial Sequence: Synthetic polypeptide"
APELLGGPSVFLFPPKPKDTLMISRTPEVTCVVVDVSHEDPEVKFNWYVDGVEVHNAKTKPREEQYNSTYRVVSVLTVLHQDWLNGKEYKCKVSNKALPAPIEKTISKAKGQPREPQVYTLPPSRDELTKNQVSLTCLVKGFYPSDIAVLWESFGTEWVSYKTTPPVLDSDGSFFLYSKLTVTKEEWQQGFVFSCSVMHEALHNHYTQKSLSLSPGK

SEQ ID NO: 90 - protein, 217 aa, Artificial Sequence; identical to SEQ ID NO: 39
  source: /note="Description of Artificial Sequence: Synthetic polypeptide"

SEQ ID NO: 91 - protein, 15 aa, Homo sapiens
EPKSCDKTHTCPPCP

SEQ ID NO: 92 - protein, 760 aa, Homo sapiens
MMDQARSAFSNLFGGEPLSYTRFSLARQVDGDNSHVEMKLAVDEEENADNNTKANVTKPKRCSGSICYGTIAVIVFFLIGFMIGYLGYCKGVEPKTECERLAGTESPVREEPGEDFPAARRLYWDDLKRKLSEKLDSTDFTGTIKLLNENSYVPREAGSQKDENLALYVENQFREFKLSKVWRDQHFVKIQVKDSAQNSVIIVDKNGRLVYLVENPGGYVAYSKAATVTGKLVHANFGTKKDFEDLYTPVNGSIVIVRAGKITFAEKVANAESLNAIGVLIYMDQTKFPIVNAELSFFGHAHLGTGDPYTPGFPSFNHTQFPPSRSSGLPNIPVQTISRAAAEKLFGNMEGDCPSDWKTDSTCRMVTSESKNVKLTVSNVLKEIKILNIFGVIKGFVEPDHYVVVGAQRDAWGPGAAKSGVGTALLLKLAQMFSDMVLKDGFQPSRSIIFASWSAGDFGSVGATEWLEGYLSSLHLKAFTYINLDKAVLGTSNFKVSASPLLYTLIEKTMQNVKHPVTGQFLYQDSNWASKVEKLTLDNAAFPFLAYSGIPAVSFCFCEDTDYPYLGTTMDTYKELIERIPELNKVARAAAEVAGQFVIKLTHDVELNLDYERYNSQLLSFVRDLNQYRADIKEMGLSLQWLYSARGDFFRATSRLTTDFGNAEKTDRFVMKKLNDRVMRVEYHFLSPYVSPKESPFRHVFWGSGSHTLPALLENLKLRKQNNGAFNETLFRNQLALATWTIQGAANALSGDVWDIDNEF

SEQ ID NO: 93 - protein, 217 aa, Artificial Sequence
  source: /note="Description of Artificial Sequence: Synthetic polypeptide"
APELLGGPSVFLFPPKPKDTLMISRTPEVTCVVVDVSHEDPEVKFNWYVDGVEVHNAKTKPREEQYNSTYRVVSVLTVLHQDWLNGKEYKCKVSNKALPAPIEKTISKAKGQPREPQVYTLPPSRDELTKNQVSLWCLVKGFYPSDIAVWWESYGTEWSSYKTTPPVLDSDGSFFLYSKLTVTKEEWQQGFVFSCSVMHEALHNHYTQKSLSLSPGK

SEQ ID NO: 94 - protein, 217 aa, Artificial Sequence
  source: /note="Description of Artificial Sequence: Synthetic polypeptide"
APEAAGGPSVFLFPPKPKDTLMISRTPEVTCVVVDVSHEDPEVKFNWYVDGVEVHNAKTKPREEQYNSTYRVVSVLTVLHQDWLNGKEYKCKVSNKALPAPIEKTISKAKGQPREPQVYTLPPSRDELTKNQVSLWCLVKGFYPSDIAVWWESYGTEWSSYKTTPPVLDSDGSFFLYSKLTVTKEEWQQGFVFSCSVMHEALHNHYTQKSLSLSPGK

SEQ ID NO: 95 - protein, 217 aa, Artificial Sequence
  source: /note="Description of Artificial Sequence: Synthetic polypeptide"
APELLGGPSVFLFPPKPKDTLYITREPEVTCVVVDVSHEDPEVKFNWYVDGVEVHNAKTKPREEQYNSTYRVVSVLTVLHQDWLNGKEYKCKVSNKALPAPIEKTISKAKGQPREPQVYTLPPSRDELTKNQVSLWCLVKGFYPSDIAVWWESYGTEWSSYKTTPPVLDSDGSFFLYSKLTVTKEEWQQGFVFSCSVMHEALHNHYTQKSLSLSPGK

SEQ ID NO: 96 - protein, 217 aa, Artificial Sequence
  source: /note="Description of Artificial Sequence: Synthetic polypeptide"
APEAAGGPSVFLFPPKPKDTLYITREPEVTCVVVDVSHEDPEVKFNWYVDGVEVHNAKTKPREEQYNSTYRVVSVLTVLHQDWLNGKEYKCKVSNKALPAPIEKTISKAKGQPREPQVYTLPPSRDELTKNQVSLWCLVKGFYPSDIAVWWESYGTEWSSYKTTPPVLDSDGSFFLYSKLTVTKEEWQQGFVFSCSVMHEALHNHYTQKSLSLSPGK

SEQ ID NO: 97 - protein, 217 aa, Artificial Sequence
  source: /note="Description of Artificial Sequence: Synthetic polypeptide"
APELLGGPSVFLFPPKPKDTLMISRTPEVTCVVVDVSHEDPEVKFNWYVDGVEVHNAKTKPREEQYNSTYRVVSVLTVLHQDWLNGKEYKCKVSNKALPAPIEKTISKAKGQPREPQVYTLPPSRDELTKNQVSLSCAVKGFYPSDIAVEWESNGQPENNYKTTPPVLDSDGSFFLVSKLTVDKSRWQQGNVFSCSVMHEALHNHYTQKSLSLSPGK

SEQ ID NO: 98 - protein, 217 aa, Artificial Sequence
  source: /note="Description of Artificial Sequence: Synthetic polypeptide"
APEAAGGPSVFLFPPKPKDTLMISRTPEVTCVVVDVSHEDPEVKFNWYVDGVEVHNAKTKPREEQYNSTYRVVSVLTVLHQDWLNGKEYKCKVSNKALPAPIEKTISKAKGQPREPQVYTLPPSRDELTKNQVSLSCAVKGFYPSDIAVEWESNGQPENNYKTTPPVLDSDGSFFLVSKLTVDKSRWQQGNVFSCSVMHEALHNHYTQKSLSLSPGK

SEQ ID NO: 99 - protein, 217 aa, Artificial Sequence
  source: /note="Description of Artificial Sequence: Synthetic polypeptide"
APELLGGPSVFLFPPKPKDTLYITREPEVTCVVVDVSHEDPEVKFNWYVDGVEVHNAKTKPREEQYNSTYRVVSVLTVLHQDWLNGKEYKCKVSNKALPAPIEKTISKAKGQPREPQVYTLPPSRDELTKNQVSLSCAVKGFYPSDIAVEWESNGQPENNYKTTPPVLDSDGSFFLVSKLTVDKSRWQQGNVFSCSVMHEALHNHYTQKSLSLSPGK

SEQ ID NO: 100 - protein, 217 aa, Artificial Sequence
  source: /note="Description of Artificial Sequence: Synthetic polypeptide"
APEAAGGPSVFLFPPKPKDTLYITREPEVTCVVVDVSHEDPEVKFNWYVDGVEVHNAKTKPREEQYNSTYRVVSVLTVLHQDWLNGKEYKCKVSNKALPAPIEKTISKAKGQPREPQVYTLPPSRDELTKNQVSLSCAVKGFYPSDIAVEWESNGQPENNYKTTPPVLDSDGSFFLVSKLTVDKSRWQQGNVFSCSVMHEALHNHYTQKSLSLSPGK

SEQ ID NO: 101 - protein, 217 aa, Artificial Sequence
  source: /note="Description of Artificial Sequence: Synthetic polypeptide"
APELLGGPSVFLFPPKPKDTLMISRTPEVTCVVVDVSHEDPEVKFNWYVDGVEVHNAKTKPREEQYNSTYRVVSVLTVLHQDWLNGKEYKCKVSNKALPAPIEKTISKAKGQPREPQVYTLPPSRDELTKNQVSLSCAVKGFYPSDIAVWWESYGTEWSSYKTTPPVLDSDGSFFLVSKLTVTKEEWQQGFVFSCSVMHEALHNHYTQKSLSLSPGK

SEQ ID NO: 102 - protein, 217 aa, Artificial Sequence
  source: /note="Description of Artificial Sequence: Synthetic polypeptide"
APEAAGGPSVFLFPPKPKDTLMISRTPEVTCVVVDVSHEDPEVKFNWYVDGVEVHNAKTKPREEQYNSTYRVVSVLTVLHQDWLNGKEYKCKVSNKALPAPIEKTISKAKGQPREPQVYTLPPSRDELTKNQVSLSCAVKGFYPSDIAVWWESYGTEWSSYKTTPPVLDSDGSFFLVSKLTVTKEEWQQGFVFSCSVMHEALHNHYTQKSLSLSPGK

SEQ ID NO: 103 - protein, 217 aa, Artificial Sequence
  source: /note="Description of Artificial Sequence: Synthetic polypeptide"
APELLGGPSVFLFPPKPKDTLYITREPEVTCVVVDVSHEDPEVKFNWYVDGVEVHNAKTKPREEQYNSTYRVVSVLTVLHQDWLNGKEYKCKVSNKALPAPIEKTISKAKGQPREPQVYTLPPSRDELTKNQVSLSCAVKGFYPSDIAVWWESYGTEWSSYKTTPPVLDSDGSFFLVSKLTVTKEEWQQGFVFSCSVMHEALHNHYTQKSLSLSPGK

SEQ ID NO: 104 - protein, 217 aa, Artificial Sequence
  source: /note="Description of Artificial Sequence: Synthetic polypeptide"
APEAAGGPSVFLFPPKPKDTLYITREPEVTCVVVDVSHEDPEVKFNWYVDGVEVHNAKTKPREEQYNSTYRVVSVLTVLHQDWLNGKEYKCKVSNKALPAPIEKTISKAKGQPREPQVYTLPPSRDELTKNQVSLSCAVKGFYPSDIAVWWESYGTEWSSYKTTPPVLDSDGSFFLVSKLTVTKEEWQQGFVFSCSVMHEALHNHYTQKSLSLSPGK

SEQ ID NO: 105 - protein, 217 aa, Artificial Sequence
  source: /note="Description of Artificial Sequence: Synthetic polypeptide"
APELLGGPSVFLFPPKPKDTLMISRTPEVTCVVVDVSHEDPEVKFNWYVDGVEVHNAKTKPREEQYNSTYRVVSVLTVLHQDWLNGKEYKCKVSNKALPAPIEKTISKAKGQPREPQVYTLPPSRDELTKNQVSLWCLVKGFYPSDIAVEWESNGQPENNYKTTPPVLDSDGSFFLYSKLTVDKSRWQQGNVFSCSVMHEALHNHYTQKSLSLSPGK

SEQ ID NO: 106 - protein, 217 aa, Artificial Sequence
  source: /note="Description of Artificial Sequence: Synthetic polypeptide"
APEAAGGPSVFLFPPKPKDTLMISRTPEVTCVVVDVSHEDPEVKFNWYVDGVEVHNAKTKPREEQYNSTYRVVSVLTVLHQDWLNGKEYKCKVSNKALPAPIEKTISKAKGQPREPQVYTLPPSRDELTKNQVSLWCLVKGFYPSDIAVEWESNGQPENNYKTTPPVLDSDGSFFLYSKLTVDKSRWQQGNVFSCSVMHEALHNHYTQKSLSLSPGK

SEQ ID NO: 107 - protein, 217 aa, Artificial Sequence
  source: /note="Description of Artificial Sequence: Synthetic polypeptide"
APELLGGPSVFLFPPKPKDTLYITREPEVTCVVVDVSHEDPEVKFNWYVDGVEVHNAKTKPREEQYNSTYRVVSVLTVLHQDWLNGKEYKCKVSNKALPAPIEKTISKAKGQPREPQVYTLPPSRDELTKNQVSLWCLVKGFYPSDIAVEWESNGQPENNYKTTPPVLDSDGSFFLYSKLTVDKSRWQQGNVFSCSVMHEALHNHYTQKSLSLSPGK

SEQ ID NO: 108 - protein, 217 aa, Artificial Sequence
  source: /note="Description of Artificial Sequence: Synthetic polypeptide"
APEAAGGPSVFLFPPKPKDTLYITREPEVTCVVVDVSHEDPEVKFNWYVDGVEVHNAKTKPREEQYNSTYRVVSVLTVLHQDWLNGKEYKCKVSNKALPAPIEKTISKAKGQPREPQVYTLPPSRDELTKNQVSLWCLVKGFYPSDIAVEWESNGQPENNYKTTPPVLDSDGSFFLYSKLTVDKSRWQQGNVFSCSVMHEALHNHYTQKSLSLSPGK

SEQ ID NO: 109 - protein, 10 aa, Homo sapiens
DKTHTCPPCP

SEQ ID NO: 110 - protein, 227 aa, Artificial Sequence
  source: /note="Description of Artificial Sequence: Synthetic polypeptide"
DKTHTCPPCPAPEAAGGPSVFLFPPKPKDTLMISRTPEVTCVVVDVSHEDPEVKFNWYVDGVEVHNAKTKPREEQYNSTYRVVSVLTVLHQDWLNGKEYKCKVSNKALPAPIEKTISKAKGQPREPQVYTLPPSRDELTKNQVSLWCLVKGFYPSDIAVWWESYGTEWSSYKTTPPVLDSDGSFFLYSKLTVTKEEWQQGFVFSCSVMHEALHNHYTQKSLSLSPGK

SEQ ID NO: 111 - protein, 217 aa, Artificial Sequence
  source: /note="Description of Artificial Sequence: Synthetic polypeptide"
APELLGGPSVFLFPPKPKDTLMISRTPEVTCVVVDVSHEDPEVKFNWYVDGVEVHNAKTKPREEQYNSTYRVVSVLTVLHQDWLNGKEYKCKVSNKALPAPIEKTISKAKGQPRFDYVTTLPPSRDELTKNQVSLTCLVKGFYPSDIAVEWESNGQPENNYKTTPPVLDSDGSFFLYSKLTVDKSRWQQGNVFSCSVMHEALHNHYGFHDLSLSPGK

SEQ ID NO: 112 - protein, 217 aa, Artificial Sequence
  source: /note="Description of Artificial Sequence: Synthetic polypeptide"
APELLGGPSVFLFPPKPKDTLMISRTPEVTCVVVDVSHEDPEVKFNWYVDGVEVHNAKTKPREEQYNSTYRVVSVLTVLHQDWLNGKEYKCKVSNKALPAPIEKTISKAKGQPRFDMVTTLPPSRDELTKNQVSLTCLVKGFYPSDIAVEWESNGQPENNYKTTPPVLDSDGSFFLYSKLTVDKSRWQQGNVFSCSVMHEALHNHYGFHDLSLSPGK

SEQ ID NO: 113 - protein, 217 aa, Artificial Sequence
  source: /note="Description of Artificial Sequence: Synthetic polypeptide"
APELLGGPSVFLFPPKPKDTLMISRTPEVTCVVVDVSHEDPEVKFNWYVDGVEVHNAKTKPREEQYNSTYRVVSVLTVLHQDWLNGKEYKCKVSNKALPAPIEKTISKAKGQPRFEYVTTLPPSRDELTKNQVSLTCLVKGFYPSDIAVEWESNGQPENNYKTTPPVLDSDGSFFLYSKLTVDKSRWQQGNVFSCSVMHEALHNHYGFHDLSLSPGK

SEQ ID NO: 114 - protein, 217 aa, Artificial Sequence
  source: /note="Description of Artificial Sequence: Synthetic polypeptide"
APELLGGPSVFLFPPKPKDTLMISRTPEVTCVVVDVSHEDPEVKFNWYVDGVEVHNAKTKPREEQYNSTYRVVSVLTVLHQDWLNGKEYKCKVSNKALPAPIEKTISKAKGQPRFEMVTTLPPSRDELTKNQVSLTCLVKGFYPSDIAVEWESNGQPENNYKTTPPVLDSDGSFFLYSKLTVDKSRWQQGNVFSCSVMHEALHNHYGFHDLSLSPGK

SEQ ID NO: 115 - protein, 217 aa, Artificial Sequence
  source: /note="Description of Artificial Sequence: Synthetic polypeptide"
APELLGGPSVFLFPPKPKDTLMISRTPEVTCVVVDVSHEDPEVKFNWYVDGVEVHNAKTKPREEQYNSTYRVVSVLTVLHQDWLNGKEYKCKVSNKALPAPIEKTISKAKGQPRFELVTTLPPSRDELTKNQVSLTCLVKGFYPSDIAVEWESNGQPENNYKTTPPVLDSDGSFFLYSKLTVDKSRWQQGNVFSCSVMHEALHNHYGFHDLSLSPGK

SEQ ID NO: 116 - protein, 217 aa, Artificial Sequence
  source: /note="Description of Artificial Sequence: Synthetic polypeptide"
APELLGGPSVFLFPPKPKDTLMISRTPEVTCVVVDVSHEDPEVEFIWYVDGVDVRYEWQLPREEQYNSTYRVVSVLTVLHQDWLNGKEYKCKVSNKALPAPIEKTISKAKGQPREPQVYTLPPSRDELTKNQVSLTCLVKGFYPSDIAVEWESNGQPENNYKTTPPVLDSDGSFFLYSKLTVDKSRWQQGNVFSCSVMHEALHNHYTQKSLSLSPGK

SEQ ID NO: 117 - protein, 217 aa, Artificial Sequence
  source: /note="Description of Artificial Sequence: Synthetic polypeptide"
APELLGGPSVFLFPPKPKDTLMISRTPEVTCVVVDVSHEDPEVGFVWYVDGVPVSWEWYWPREEQYNSTYRVVSVLTVLHQDWLNGKEYKCKVSNKALPAPIEKTISKAKGQPREPQVYTLPPSRDELTKNQVSLTCLVKGFYPSDIAVEWESNGQPENNYKTTPPVLDSDGSFFLYSKLTVDKSRWQQGNVFSCSVMHEALHNHYTQKSLSLSPGK

SEQ ID NO: 118 - protein, 217 aa, Artificial Sequence
  source: /note="Description of Artificial Sequence: Synthetic polypeptide"
APELLGGPSVFLFPPKPKDTLMISRTPEVTCVVVDVSHEDPEVQFDWYVDGVMVRREWHRPREEQYNSTYRVVSVLTVLHQDWLNGKEYKCKVSNKALPAPIEKTISKAKGQPREPQVYTLPPSRDELTKNQVSLTCLVKGFYPSDIAVEWESNGQPENNYKTTPPVLDSDGSFFLYSKLTVDKSRWQQGNVFSCSVMHEALHNHYTQKSLSLSPGK

SEQ ID NO: 119 - protein, 217 aa, Artificial Sequence
  source: /note="Description of Artificial Sequence: Synthetic polypeptide"
APELLGGPSVFLFPPKPKDTLMISRTPEVTCVVVDVSHEDPEVSFEWYVDGVPVRWEWQWPREEQYNSTYRVVSVLTVLHQDWLNGKEYKCKVSNKALPAPIEKTISKAKGQPREPQVYTLPPSRDELTKNQVSLTCLVKGFYPSDIAVEWESNGQPENNYKTTPPVLDSDGSFFLYSKLTVDKSRWQQGNVFSCSVMHEALHNHYTQKSLSLSPGK

SEQ ID NO: 120 - protein, 217 aa, Artificial Sequence
  source: /note="Description of Artificial Sequence: Synthetic polypeptide"
APELLGGPSVFLFPPKPKDTLMISRTPEVTCVVVDVSHEDPEVAFTWYVDGVPVRWEWQNPREEQYNSTYRVVSVLTVLHQDWLNGKEYKCKVSNKALPAPIEKTISKAKGQPREPQVYTLPPSRDELTKNQVSLTCLVKGFYPSDIAVEWESNGQPENNYKTTPPVLDSDGSFFLYSKLTVDKSRWQQGNVFSCSVMHEALHNHYTQKSLSLSPGK

SEQ ID NO: 121 - protein, 217 aa, Artificial Sequence
  source: /note="Description of Artificial Sequence: Synthetic polypeptide"
APELLGGPSVFLFPPKPKDTLMISRTPEVTCVVVDPQTPPWEVKFNWYVDGVEVHNAKTKPREEEYYTYYRVVSVLTVLHQDWLNGKEYKCKVSNKALPAPIEKTISKAKGQPREPQVYTLPPSRDELTKNQVSLTCLVKGFYPSDIAVEWESNGQPENNYKTTPPVLDSDGSFFLYSKLTVDKSRWQQGNVFSCSVMHEALHNHYTQKSLSLSPGK

SEQ ID NO: 122 - protein, 217 aa, Artificial Sequence
  source: /note="Description of Artificial Sequence: Synthetic polypeptide"
APELLGGPSVFLFPPKPKDTLMISRTPEVTCVVVDPPSPPWEVKFNWYVDGVEVHNAKTKPREEEYYSNYRVVSVLTVLHQDWLNGKEYKCKVSNKALPAPIEKTISKAKGQPREPQVYTLPPSRDELTKNQVSLTCLVKGFYPSDIAVEWESNGQPENNYKTTPPVLDSDGSFFLYSKLTVDKSRWQQGNVFSCSVMHEALHNHYTQKSLSLSPGK

SEQ ID NO: 123 - protein, 217 aa, Artificial Sequence
  source: /note="Description of Artificial Sequence: Synthetic polypeptide"
APELLGGPSVFLFPPKPKDTLMISRTPEVTCVVVDPQTPPWEVKFNWYVDGVEVHNAKTKPREEEYYSNYRVVSVLTVLHQDWLNGKEYKCKVSNKALPAPIEKTISKAKGQPREPQVYTLPPSRDELTKNQVSLTCLVKGFYPSDIAVEWESNGQPENNYKTTPPVLDSDGSFFLYSKLTVDKSRWQQGNVFSCSVMHEALHNHYTQKSLSLSPGK

SEQ ID NO: 124 - protein, 217 aa, Artificial Sequence
  source: /note="Description of Artificial Sequence: Synthetic polypeptide"
APELLGGPSVFLFPPKPKDTLMISRTPEVTCVVVDFRGPPWEVKFNWYVDGVEVHNAKTKPREEEYYHDYRVVSVLTVLHQDWLNGKEYKCKVSNKALPAPIEKTISKAKGQPREPQVYTLPPSRDELTKNQVSLTCLVKGFYPSDIAVEWESNGQPENNYKTTPPVLDSDGSFFLYSKLTVDKSRWQQGNVFSCSVMHEALHNHYTQKSLSLSPGK

SEQ ID NO: 125 - protein, 217 aa, Artificial Sequence
  source: /note="Description of Artificial Sequence: Synthetic polypeptide"
APELLGGPSVFLFPPKPKDTLMISRTPEVTCVVVDPQTVPWEVKFNWYVDGVEVHNAKTKPREEEYYSNYRVVSVLTVLHQDWLNGKEYKCKVSNKALPAPIEKTISKAKGQPREPQVYTLPPSRDELTKNQVSLTCLVKGFYPSDIAVEWESNGQPENNYKTTPPVLDSDGSFFLYSKLTVDKSRWQQGNVFSCSVMHEALHNHYTQKSLSLSPGK

SEQ ID NO: 126 - protein, 217 aa, Artificial Sequence
  source: /note="Description of Artificial Sequence: Synthetic polypeptide"
APELLGGPSVFLFPPKPKDTLMISRTPEVTCVVVDVSVPPRMVKFNWYVDGVEVHNAKTKSLTSQHNSTVRVVSVLTVLHQDWLNGKEYKCKVSNKALPAPIEKTISKAKGQPREPQVYTLPPSRDELTKNQVSLTCLVKGFYPSDIAVEWESNGQPENNYKTTPPVLDSDGSFFLYSKLTVDKSRWQQGNVFSCSVMHEALHNHYTQKSLSLSPGK

SEQ ID NO: 127 - protein, 217 aa, Artificial Sequence
  source: /note="Description of Artificial Sequence: Synthetic polypeptide"
APELLGGPSVFLFPPKPKDTLMISRTPEVTCVVVDVSVPPWMVKFNWYVDGVEVHNAKTKSLTSQHNSTVRVVSVLTVLHQDWLNGKEYKCKVSNKALPAPIEKTISKAKGQPREPQVYTLPPSRDELTKNQVSLTCLVKGFYPSDIAVEWESNGQPENNYKTTPPVLDSDGSFFLYSKLTVDKSRWQQGNVFSCSVMHEALHNHYTQKSLSLSPGK

SEQ ID NO: 128 - protein, 217 aa, Artificial Sequence
  source: /note="Description of Artificial Sequence: Synthetic polypeptide"
APELLGGPSVFLFPPKPKDTLMISRTPEVTCVVVDVSDMWEYVKFNWYVDGVEVHNAKTKPWVKQLNSTWRVVSVLTVLHQDWLNGKEYKCKVSNKALPAPIEKTISKAKGQPREPQVYTLPPSRDELTKNQVSLTCLVKGFYPSDIAVEWESNGQPENNYKTTPPVLDSDGSFFLYSKLTVDKSRWQQGNVFSCSVMHEALHNHYTQKSLSLSPGK

SEQ ID NO: 129 - protein, 217 aa, Artificial Sequence
  source: /note="Description of Artificial Sequence: Synthetic polypeptide"
APELLGGPSVFLFPPKPKDTLMISRTPEVTCVVVDVSDDWTWVKFNWYVDGVEVHNAKTKPWIAQPNSTWRVVSVLTVLHQDWLNGKEYKCKVSNKALPAPIEKTISKAKGQPREPQVYTLPPSRDELTKNQVSLTCLVKGFYPSDIAVEWESNGQPENNYKTTPPVLDSDGSFFLYSKLTVDKSRWQQGNVFSCSVMHEALHNHYTQKSLSLSPGK

SEQ ID NO: 130 - protein, 217 aa, Artificial Sequence
  source: /note="Description of Artificial Sequence: Synthetic polypeptide"
APELLGGPSVFLFPPKPKDTLMISRTPEVTCVVVDVSDDWEWVKFNWYVDGVEVHNAKTKPWKLQLNSTWRVVSVLTVLHQDWLNGKEYKCKVSNKALPAPIEKTISKAKGQPREPQVYTLPPSRDELTKNQVSLTCLVKGFYPSDIAVEWESNGQPENNYKTTPPVLDSDGSFFLYSKLTVDKSRWQQGNVFSCSVMHEALHNHYTQKSLSLSPGK

SEQ ID NO: 131 - protein, 217 aa, Artificial Sequence
  source: /note="Description of Artificial Sequence: Synthetic polypeptide"
APELLGGPSVFLFPPKPKDTLMISRTPEVTCVVVDVSHEDPWVWFYWYVDGVEVHNAKTKPREEQYNSTYRVVSVLTVLHQDWLNGKEYKCSVVNIALWWSIEKTISKAKGQPREPQVYTLPPSRDELTKNQVSLTCLVKGFYPSDIAVEWESNGQPENNYKTTPPVLDSDGSFFLYSKLTVDKSRWQQGNVFSCSVMHEALHNHYTQKSLSLSPGK

SEQ ID NO: 132 - protein, 217 aa, Artificial Sequence
  source: /note="Description of Artificial Sequence: Synthetic polypeptide"
APELLGGPSVFLFPPKPKDTLMISRTPEVTCVVVDVSHEDPVVGFRWYVDGVEVHNAKTKPREEQYNSTYRVVSVLTVLHQDWLNGKEYKCRVSNSALTWKIEKTISKAKGQPREPQVYTLPPSRDELTKNQVSLTCLVKGFYPSDIAVEWESNGQPENNYKTTPPVLDSDGSFFLYSKLTVDKSRWQQGNVFSCSVMHEALHNHYTQKSLSLSPGK

SEQ ID NO: 133 - protein, 217 aa, Artificial Sequence
  source: /note="Description of Artificial Sequence: Synthetic polypeptide"
APELLGGPSVFLFPPKPKDTLMISRTPEVTCVVVDVSHEDPVVGFRWYVDGVEVHNAKTKPREEQYNSTYRVVSVLTVLHQDWLNGKEYKCRVSNSALSWRIEKTISKAKGQPREPQVYTLPPSRDELTKNQVSLTCLVKGFYPSDIAVEWESNGQPENNYKTTPPVLDSDGSFFLYSKLTVDKSRWQQGNVFSCSVMHEALHNHYTQKSLSLSPGK

SEQ ID NO: 134 - protein, 217 aa, Artificial Sequence
  source: /note="Description of Artificial Sequence: Synthetic polypeptide"
APELLGGPSVFLFPPKPKDTLMISRTPEVTCVVVDVSHEDPIVGFRWYVDGVEVHNAKTKPREEQYNSTYRVVSVLTVLHQDWLNGKEYKCRVSNSALRWRIEKTISKAKGQPREPQVYTLPPSRDELTKNQVSLTCLVKGFYPSDIAVEWESNGQPENNYKTTPPVLDSDGSFFLYSKLTVDKSRWQQGNVFSCSVMHEALHNHYTQKSLSLSPGK

SEQ ID NO: 135 - protein, 217 aa, Artificial Sequence
  source: /note="Description of Artificial Sequence: Synthetic polypeptide"
APELLGGPSVFLFPPKPKDTLMISRTPEVTCVVVDVSHEDPAVGFEWYVDGVEVHNAKTKPREEQYNSTYRVVSVLTVLHQDWLNGKEYKCQVFNWALDWVIEKTISKAKGQPREPQVYTLPPSRDELTKNQVSLTCLVKGFYPSDIAVEWESNGQPENNYKTTPPVLDSDGSFFLYSKLTVDKSRWQQGNVFSCSVMHEALHNHYTQKSLSLSPGK

SEQ ID NO: 136 - protein, 217 aa, Artificial Sequence
  source: /note="Description of Artificial Sequence: Synthetic polypeptide"
APEAAGGPSVFLFPPKPKDTLMISRTPEVTCVVVDVSHEDPEVKFNWYVDGVEVHNAKTKPREEQYNSTYRVVSVLTVLHQDWLNGKEYKCKVSNKALPAPIEKTISKAKGQPREPQVYTLPPSRDELTKNQVSLWCLVKGFYPSDIAVLWESYGTEWSSYKTTPPVLDSDGSFFLYSKLTVTKEEWQQGFVFSCSVMHEALHNHYTQKSLSLSPGK

SEQ ID NO: 137 - protein, 217 aa, Artificial Sequence
  source: /note="Description of Artificial Sequence: Synthetic polypeptide"
APELLGGPSVFLFPPKPKDTLMISRTPEVTCVVVDVSHEDPEVKFNWYVDGVEVHNAKTKPREEQYNSTYRVVSVLTVLHQDWLNGKEYKCKVSNKALPAPIEKTISKAKGQPREPQVYTLPPSRDELTKNQVSLWCLVKGFYPSDIAVEWESFGTEWSSYKTTPPVLDSDGSFFLYSKLTVTKEEWQQGFVFSCSVMHEALHNHYTQKSLSLSPGK

SEQ ID NO: 138 - protein, 217 aa, Artificial Sequence
  source: /note="Description of Artificial Sequence: Synthetic polypeptide"
APEAAGGPSVFLFPPKPKDTLMISRTPEVTCVVVDVSHEDPEVKFNWYVDGVEVHNAKTKPREEQYNSTYRVVSVLTVLHQDWLNGKEYKCKVSNKALPAPIEKTISKAKGQPREPQVYTLPPSRDELTKNQVSLWCLVKGFYPSDIAVEWESFGTEWSSYKTTPPVLDSDGSFFLYSKLTVTKEEWQQGFVFSCSVMHEALHNHYTQKSLSLSPGK

SEQ ID NO: 139 - protein, 217 aa, Artificial Sequence
  source: /note="Description of Artificial Sequence: Synthetic polypeptide"
APEAAGGPSVFLFPPKPKDTLMISRTPEVTCVVVDVSHEDPEVKFNWYVDGVEVHNAKTKPREEQYNSTYRVVSVLTVLHQDWLNGKEYKCKVSNKALGAPIEKTISKAKGQPREPQVYTLPPSRDELTKNQVSLWCLVKGFYPSDIAVEWESFGTEWSSYKTTPPVLDSDGSFFLYSKLTVTKEEWQQGFVFSCSVMHEALHNHYTQKSLSLSPGK

SEQ ID NO: 140 - protein, 217 aa, Artificial Sequence
  source: /note="Description of Artificial Sequence: Synthetic polypeptide"
APELLGGPSVFLFPPKPKDTLYITREPEVTCVVVDVSHEDPEVKFNWYVDGVEVHNAKTKPREEQYNSTYRVVSVLTVLHQDWLNGKEYKCKVSNKALPAPIEKTISKAKGQPREPQVYTLPPSRDELTKNQVSLWCLVKGFYPSDIAVEWESFGTEWSSYKTTPPVLDSDGSFFLYSKLTVTKEEWQQGFVFSCSVMHEALHNHYTQKSLSLSPGK

SEQ ID NO: 141 - protein, 217 aa, Artificial Sequence
  source: /note="Description of Artificial Sequence: Synthetic polypeptide"
APEAAGGPSVFLFPPKPKDTLYITREPEVTCVVVDVSHEDPEVKFNWYVDGVEVHNAKTKPREEQYNSTYRVVSVLTVLHQDWLNGKEYKCKVSNKALPAPIEKTISKAKGQPREPQVYTLPPSRDELTKNQVSLWCLVKGFYPSDIAVEWESFGTEWSSYKTTPPVLDSDGSFFLYSKLTVTKEEWQQGFVFSCSVMHEALHNHYTQKSLSLSPGK

SEQ ID NO: 142 - protein, 217 aa, Artificial Sequence
  source: /note="Description of Artificial Sequence: Synthetic polypeptide"
APEAAGGPSVFLFPPKPKDTLYITREPEVTCVVVDVSHEDPEVKFNWYVDGVEVHNAKTKPREEQYNSTYRVVSVLTVLHQDWLNGKEYKCKVSNKALGAPIEKTISKAKGQPREPQVYTLPPSRDELTKNQVSLWCLVKGFYPSDIAVEWESFGTEWSSYKTTPPVLDSDGSFFLYSKLTVTKEEWQQGFVFSCSVMHEALHNHYTQKSLSLSPGK

SEQ ID NO: 143 - protein, 217 aa, Artificial Sequence
  source: /note="Description of Artificial Sequence: Synthetic polypeptide"
APELLGGPSVFLFPPKPKDTLMISRTPEVTCVVVDVSHEDPEVKFNWYVDGVEVHNAKTKPREEQYNSTYRVVSVLTVLHQDWLNGKEYKCKVSNKALPAPIEKTISKAKGQPREPQVYTLPPSRDELTKNQVSLSCAVKGFYPSDIAVEWESFGTEWSSYKTTPPVLDSDGSFFLVSKLTVTKEEWQQGFVFSCSVMHEALHNHYTQKSLSLSPGK

SEQ ID NO: 144 - protein, 217 aa, Artificial Sequence
  source: /note="Description of Artificial Sequence: Synthetic polypeptide"
APEAAGGPSVFLFPPKPKDTLMISRTPEVTCVVVDVSHEDPEVKFNWYVDGVEVHNAKTKPREEQYNSTYRVVSVLTVLHQDWLNGKEYKCKVSNKALPAPIEKTISKAKGQPREPQVYTLPPSRDELTKNQVSLSCAVKGFYPSDIAVEWESFGTEWSSYKTTPPVLDSDGSFFLVSKLTVTKEEWQQGFVFSCSVMHEALHNHYTQKSLSLSPGK

SEQ ID NO: 145 - protein, 217 aa, Artificial Sequence
  source: /note="Description of Artificial Sequence: Synthetic polypeptide"
APEAAGGPSVFLFPPKPKDTLMISRTPEVTCVVVDVSHEDPEVKFNWYVDGVEVHNAKTKPREEQYNSTYRVVSVLTVLHQDWLNGKEYKCKVSNKALGAPIEKTISKAKGQPREPQVYTLPPSRDELTKNQVSLSCAVKGFYPSDIAVEWESFGTEWSSYKTTPPVLDSDGSFFLVSKLTVTKEEWQQGFVFSCSVMHEALHNHYTQKSLSLSPGK

SEQ ID NO: 146 - protein, 217 aa, Artificial Sequence
  source: /note="Description of Artificial Sequence: Synthetic polypeptide"
APELLGGPSVFLFPPKPKDTLYITREPEVTCVVVDVSHEDPEVKFNWYVDGVEVHNAKTKPREEQYNSTYRVVSVLTVLHQDWLNGKEYKCKVSNKALPAPIEKTISKAKGQPREPQVYTLPPSRDELTKNQVSLSCAVKGFYPSDIAVEWESFGTEWSSYKTTPPVLDSDGSFFLVSKLTVTKEEWQQGFVFSCSVMHEALHNHYTQKSLSLSPGK

SEQ ID NO: 147 - protein, 217 aa, Artificial Sequence
  source: /note="Description of Artificial Sequence: Synthetic polypeptide"
APEAAGGPSVFLFPPKPKDTLYITREPEVTCVVVDVSHEDPEVKFNWYVDGVEVHNAKTKPREEQYNSTYRVVSVLTVLHQDWLNGKEYKCKVSNKALPAPIEKTISKAKGQPREPQVYTLPPSRDELTKNQVSLSCAVKGFYPSDIAVEWESFGTEWSSYKTTPPVLDSDGSFFLVSKLTVTKEEWQQGFVFSCSVMHEALHNHYTQKSLSLSPGK

SEQ ID NO: 148 - protein, 217 aa, Artificial Sequence
  source: /note="Description of Artificial Sequence: Synthetic polypeptide"
APEAAGGPSVFLFPPKPKDTLYITREPEVTCVVVDVSHEDPEVKFNWYVDGVEVHNAKTKPREEQYNSTYRVVSVLTVLHQDWLNGKEYKCKVSNKALGAPIEKTISKAKGQPREPQVYTLPPSRDELTKNQVSLSCAVKGFYPSDIAVEWESFGTEWSSYKTTPPVLDSDGSFFLVSKLTVTKEEWQQGFVFSCSVMHEALHNHYTQKSLSLSPGK

SEQ ID NO: 149 - protein, 217 aa, Artificial Sequence
  source: /note="Description of Artificial Sequence: Synthetic polypeptide"
APELLGGPSVFLFPPKPKDTLMISRTPEVTCVVVDVSHEDPEVKFNWYVDGVEVHNAKTKPREEQYNSTYRVVSVLTVLHQDWLNGKEYKCKVSNKALPAPIEKTISKAKGQPREPQVYTLPPSRDELTKNQVSLWCLVKGFYPSDIAVEWESYGTEWANYKTTPPVLDSDGSFFLYSKLTVTKEEWQQGFVFSCSVMHEALHNHYTQKSLSLSPGK

SEQ ID NO: 150 - protein, 217 aa, Artificial Sequence
  source: /note="Description of Artificial Sequence: Synthetic polypeptide"
APEAAGGPSVFLFPPKPKDTLMISRTPEVTCVVVDVSHEDPEVKFNWYVDGVEVHNAKTKPREEQYNSTYRVVSVLTVLHQDWLNGKEYKCKVSNKALPAPIEKTISKAKGQPREPQVYTLPPSRDELTKNQVSLWCLVKGFYPSDIAVEWESYGTEWANYKTTPPVLDSDGSFFLYSKLTVTKEEWQQGFVFSCSVMHEALHNHYTQKSLSLSPGK

SEQ ID NO: 151 - protein, 217 aa, Artificial Sequence
  source: /note="Description of Artificial Sequence: Synthetic polypeptide"
APEAAGGPSVFLFPPKPKDTLMISRTPEVTCVVVDVSHEDPEVKFNWYVDGVEVHNAKTKPREEQYNSTYRVVSVLTVLHQDWLNGKEYKCKVSNKALGAPIEKTISKAKGQPREPQVYTLPPSRDELTKNQVSLWCLVKGFYPSDIAVEWESYGTEWANYKTTPPVLDSDGSFFLYSKLTVTKEEWQQGFVFSCSVMHEALHNHYTQKSLSLSPGK

SEQ ID NO: 152 - protein, 217 aa, Artificial Sequence
  source: /note="Description of Artificial Sequence: Synthetic polypeptide"
APELLGGPSVFLFPPKPKDTLYITREPEVTCVVVDVSHEDPEVKFNWYVDGVEVHNAKTKPREEQYNSTYRVVSVLTVLHQDWLNGKEYKCKVSNKALPAPIEKTISKAKGQPREPQVYTLPPSRDELTKNQVSLWCLVKGFYPSDIAVEWESYGTEWANYKTTPPVLDSDGSFFLYSKLTVTKEEWQQGFVFSCSVMHEALHNHYTQKSLSLSPGK

SEQ ID NO: 153 - protein, 217 aa, Artificial Sequence
  source: /note="Description of Artificial Sequence: Synthetic polypeptide"
APEAAGGPSVFLFPPKPKDTLYITREPEVTCVVVDVSHEDPEVKFNWYVDGVEVHNAKTKPREEQYNSTYRVVSVLTVLHQDWLNGKEYKCKVSNKALPAPIEKTISKAKGQPREPQVYTLPPSRDELTKNQVSLWCLVKGFYPSDIAVEWESYGTEWANYKTTPPVLDSDGSFFLYSKLTVTKEEWQQGFVFSCSVMHEALHNHYTQKSLSLSPGK

SEQ ID NO: 154 - protein, 217 aa, Artificial Sequence
  source: /note="Description of Artificial Sequence: Synthetic polypeptide"
APEAAGGPSVFLFPPKPKDTLYITREPEVTCVVVDVSHEDPEVKFNWYVDGVEVHNAKTKPREEQYNSTYRVVSVLTVLHQDWLNGKEYKCKVSNKALGAPIEKTISKAKGQPREPQVYTLPPSRDELTKNQVSLWCLVKGFYPSDIAVEWESYGTEWANYKTTPPVLDSDGSFFLYSKLTVTKEEWQQGFVFSCSVMHEALHNHYTQKSLSLSPGK

SEQ ID NO: 155 - protein, 217 aa, Artificial Sequence
  source: /note="Description of Artificial Sequence: Synthetic polypeptide"
APELLGGPSVFLFPPKPKDTLMISRTPEVTCVVVDVSHEDPEVKFNWYVDGVEVHNAKTKPREEQYNSTYRVVSVLTVLHQDWLNGKEYKCKVSNKALPAPIEKTISKAKGQPREPQVYTLPPSRDELTKNQVSLSCAVKGFYPSDIAVEWESYGTEWANYKTTPPVLDSDGSFFLVSKLTVTKEEWQQGFVFSCSVMHEALHNHYTQKSLSLSPGK

SEQ ID NO: 156 - protein, 217 aa, Artificial Sequence
  source: /note="Description of Artificial Sequence: Synthetic polypeptide"
APEAAGGPSVFLFPPKPKDTLMISRTPEVTCVVVDVSHEDPEVKFNWYVDGVEVHNAKTKPREEQYNSTYRVVSVLTVLHQDWLNGKEYKCKVSNKALPAPIEKTISKAKGQPREPQVYTLPPSRDELTKNQVSLSCAVKGFYPSDIAVEWESYGTEWANYKTTPPVLDSDGSFFLVSKLTVTKEEWQQGFVFSCSVMHEALHNHYTQKSLSLSPGK

SEQ ID NO: 157 - protein, 217 aa, Artificial Sequence
  source: /note="Description of Artificial Sequence: Synthetic polypeptide"
APEAAGGPSVFLFPPKPKDTLMISRTPEVTCVVVDVSHEDPEVKFNWYVDGVEVHNAKTKPREEQYNSTYRVVSVLTVLHQDWLNGKEYKCKVSNKALGAPIEKTISKAKGQPREPQVYTLPPSRDELTKNQVSLSCAVKGFYPSDIAVEWESYGTEWANYKTTPPVLDSDGSFFLVSKLTVTKEEWQQGFVFSCSVMHEALHNHYTQKSLSLSPGK

SEQ ID NO: 158 - protein, 217 aa, Artificial Sequence
  source: /note="Description of Artificial Sequence: Synthetic polypeptide"
APELLGGPSVFLFPPKPKDTLYITREPEVTCVVVDVSHEDPEVKFNWYVDGVEVHNAKTKPREEQYNSTYRVVSVLTVLHQDWLNGKEYKCKVSNKALPAPIEKTISKAKGQPREPQVYTLPPSRDELTKNQVSLSCAVKGFYPSDIAVEWESYGTEWANYKTTPPVLDSDGSFFLVSKLTVTKEEWQQGFVFSCSVMHEALHNHYTQKSLSLSPGK

SEQ ID NO: 159 - protein, 217 aa, Artificial Sequence
  source: /note="Description of Artificial Sequence: Synthetic polypeptide"
APEAAGGPSVFLFPPKPKDTLYITREPEVTCVVVDVSHEDPEVKFNWYVDGVEVHNAKTKPREEQYNSTYRVVSVLTVLHQDWLNGKEYKCKVSNKALPAPIEKTISKAKGQPREPQVYTLPPSRDELTKNQVSLSCAVKGFYPSDIAVEWESYGTEWANYKTTPPVLDSDGSFFLVSKLTVTKEEWQQGFVFSCSVMHEALHNHYTQKSLSLSPGK

SEQ ID NO: 160 - protein, 217 aa, Artificial Sequence
  source: /note="Description of Artificial Sequence: Synthetic polypeptide"
APEAAGGPSVFLFPPKPKDTLYITREPEVTCVVVDVSHEDPEVKFNWYVDGVEVHNAKTKPREEQYNSTYRVVSVLTVLHQDWLNGKEYKCKVSNKALGAPIEKTISKAKGQPREPQVYTLPPSRDELTKNQVSLSCAVKGFYPSDIAVEWESYGTEWANYKTTPPVLDSDGSFFLVSKLTVTKEEWQQGFVFSCSVMHEALHNHYTQKSLSLSPGK

SEQ ID NO: 161 - protein, 217 aa, Artificial Sequence
  source: /note="Description of Artificial Sequence: Synthetic polypeptide"
APELLGGPSVFLFPPKPKDTLMISRTPEVTCVVVDVSHEDPEVKFNWYVDGVEVHNAKTKPREEQYNSTYRVVSVLTVLHQDWLNGKEYKCKVSNKALPAPIEKTISKAKGQPREPQVYTLPPSRDELTKNQVSLWCLVKGFYPSDIAVEWESYGTEWVNYKTTPPVLDSDGSFFLYSKLTVTKEEWQQGFVFSCSVMHEALHNHYTQKSLSLSPGK

SEQ ID NO: 162 - protein, 217 aa, Artificial Sequence
  source: /note="Description of Artificial Sequence: Synthetic polypeptide"
APEAAGGPSVFLFPPKPKDTLMISRTPEVTCVVVDVSHEDPEVKFNWYVDGVEVHNAKTKPREEQYNSTYRVVSVLTVLHQDWLNGKEYKCKVSNKALPAPIEKTISKAKGQPREPQVYTLPPSRDELTKNQVSLWCLVKGFYPSDIAVEWESYGTEWVNYKTTPPVLDSDGSFFLYSKLTVTKEEWQQGFVFSCSVMHEALHNHYTQKSLSLSPGK

SEQ ID NO: 163 - protein, 217 aa, Artificial Sequence
  source: /note="Description of Artificial Sequence: Synthetic polypeptide"
APEAAGGPSVFLFPPKPKDTLMISRTPEVTCVVVDVSHEDPEVKFNWYVDGVEVHNAKTKPREEQYNSTYRVVSVLTVLHQDWLNGKEYKCKVSNKALGAPIEKTISKAKGQPREPQVYTLPPSRDELTKNQVSLWCLVKGFYPSDIAVEWESYGTEWVNYKTTPPVLDSDGSFFLYSKLTVTKEEWQQGFVFSCSVMHEALHNHYTQKSLSLSPGK

SEQ ID NO: 164 - protein, 217 aa, Artificial Sequence
  source: /note="Description of Artificial Sequence: Synthetic polypeptide"
APELLGGPSVFLFPPKPKDTLYITREPEVTCVVVDVSHEDPEVKFNWYVDGVEVHNAKTKPREEQYNSTYRVVSVLTVLHQDWLNGKEYKCKVSNKALPAPIEKTISKAKGQPREPQVYTLPPSRDELTKNQVSLWCLVKGFYPSDIAVEWESYGTEWVNYKTTPPVLDSDGSFFLYSKLTVTKEEWQQGFVFSCSVMHEALHNHYTQKSLSLSPGK

SEQ ID NO: 165 - protein, 217 aa, Artificial Sequence
  source: /note="Description of Artificial Sequence: Synthetic polypeptide"
APEAAGGPSVFLFPPKPKDTLYITREPEVTCVVVDVSHEDPEVKFNWYVDGVEVHNAKTKPREEQYNSTYRVVSVLTVLHQDWLNGKEYKCKVSNKALPAPIEKTISKAKGQPREPQVYTLPPSRDELTKNQVSLWCLVKGFYPSDIAVEWESYGTEWVNYKTTPPVLDSDGSFFLYSKLTVTKEEWQQGFVFSCSVMHEALHNHYTQKSLSLSPGK

SEQ ID NO: 166 - protein, 217 aa, Artificial Sequence
  source: /note="Description of Artificial Sequence: Synthetic polypeptide"
APEAAGGPSVFLFPPKPKDTLYITREPEVTCVVVDVSHEDPEVKFNWYVDGVEVHNAKTKPREEQYNSTYRVVSVLTVLHQDWLNGKEYKCKVSNKALGAPIEKTISKAKGQPREPQVYTLPPSRDELTKNQVSLWCLVKGFYPSDIAVEWESYGTEWVNYKTTPPVLDSDGSFFLYSKLTVTKEEWQQGFVFSCSVMHEALHNHYTQKSLSLSPGK

SEQ ID NO: 167 - protein, 217 aa, Artificial Sequence
  source: /note="Description of Artificial Sequence: Synthetic polypeptide"
APELLGGPSVFLFPPKPKDTLMISRTPEVTCVVVDVSHEDPEVKFNWYVDGVEVHNAKTKPREEQYNSTYRVVSVLTVLHQDWLNGKEYKCKVSNKALPAPIEKTISKAKGQPREPQVYTLPPSRDELTKNQVSLSCAVKGFYPSDIAVEWESYGTEWVNYKTTPPVLDSDGSFFLVSKLTVTKEEWQQGFVFSCSVMHEALHNHYTQKSLSLSPGK

SEQ ID NO: 168 - protein, 217 aa, Artificial Sequence
  source: /note="Description of Artificial Sequence: Synthetic polypeptide"
APEAAGGPSVFLFPPKPKDTLMISRTPEVTCVVVDVSHEDPEVKFNWYVDGVEVHNAKTKPREEQYNSTYRVVSVLTVLHQDWLNGKEYKCKVSNKALPAPIEKTISKAKGQPREPQVYTLPPSRDELTKNQVSLSCAVKGFYPSDIAVEWESYGTEWVNYKTTPPVLDSDGSFFLVSKLTVTKEEWQQGFVFSCSVMHEALHNHYTQKSLSLSPGK

SEQ ID NO: 169 - protein, 217 aa, Artificial Sequence
  source: /note="Description of Artificial Sequence: Synthetic polypeptide"
APEAAGGPSVFLFPPKPKDTLMISRTPEVTCVVVDVSHEDPEVKFNWYVDGVEVHNAKTKPREEQYNSTYRVVSVLTVLHQDWLNGKEYKCKVSNKALGAPIEKTISKAKGQPREPQVYTLPPSRDELTKNQVSLSCAVKGFYPSDIAVEWESYGTEWVNYKTTPPVLDSDGSFFLVSKLTVTKEEWQQGFVFSCSVMHEALHNHYTQKSLSLSPGK

SEQ ID NO: 170 - protein, 217 aa, Artificial Sequence
  source: /note="Description of Artificial Sequence: Synthetic polypeptide"
APELLGGPSVFLFPPKPKDTLYITREPEVTCVVVDVSHEDPEVKFNWYVDGVEVHNAKTKPREEQYNSTYRVVSVLTVLHQDWLNGKEYKCKVSNKALPAPIEKTISKAKGQPREPQVYTLPPSRDELTKNQVSLSCAVKGFYPSDIAVEWESYGTEWVNYKTTPPVLDSDGSFFLVSKLTVTKEEWQQGFVFSCSVMHEALHNHYTQKSLSLSPGK

SEQ ID NO: 171 - protein, 217 aa, Artificial Sequence
  source: /note="Description of Artificial Sequence: Synthetic polypeptide"
APEAAGGPSVFLFPPKPKDTLYITREPEVTCVVVDVSHEDPEVKFNWYVDGVEVHNAKTKPREEQYNSTYRVVSVLTVLHQDWLNGKEYKCKVSNKALPAPIEKTISKAKGQPREPQVYTLPPSRDELTKNQVSLSCAVKGFYPSDIAVEWESYGTEWVNYKTTPPVLDSDGSFFLVSKLTVTKEEWQQGFVFSCSVMHEALHNHYTQKSLSLSPGK

SEQ ID NO: 172 - protein, 217 aa, Artificial Sequence
  source: /note="Description of Artificial Sequence: Synthetic polypeptide"
APEAAGGPSVFLFPPKPKDTLYITREPEVTCVVVDVSHEDPEVKFNWYVDGVEVHNAKTKPREEQYNSTYRVVSVLTVLHQDWLNGKEYKCKVSNKALGAPIEKTISKAKGQPREPQVYTLPPSRDELTKNQVSLSCAVKGFYPSDIAVEWESYGTEWVNYKTTPPVLDSDGSFFLVSKLTVTKEEWQQGFVFSCSVMHEALHNHYTQKSLSLSPGK

SEQ ID NO: 173 - protein, 217 aa, Artificial Sequence
  source: /note="Description of Artificial Sequence: Synthetic polypeptide"
APELLGGPSVFLFPPKPKDTLMISRTPEVTCVVVDVSHEDPEVKFNWYVDGVEVHNAKTKPREEQYNSTYRVVSVLTVLHQDWLNGKEYKCKVSNKALPAPIEKTISKAKGQPREPQVYTLPPSRDELTKNQVSLWCLVKGFYPSDIAVEWESYGTEWSNYKTTPPVLDSDGSFFLYSKLTVSKEEWQQGFVFSCSVMHEALHNHYTQKSLSLSPGK

SEQ ID NO: 174 - protein, 217 aa, Artificial Sequence
  source: /note="Description of Artificial Sequence: Synthetic polypeptide"
APEAAGGPSVFLFPPKPKDTLMISRTPEVTCVVVDVSHEDPEVKFNWYVDGVEVHNAKTKPREEQYNSTYRVVSVLTVLHQDWLNGKEYKCKVSNKALPAPIEKTISKAKGQPREPQVYTLPPSRDELTKNQVSLWCLVKGFYPSDIAVEWESYGTEWSNYKTTPPVLDSDGSFFLYSKLTVSKEEWQQGFVFSCSVMHEALHNHYTQKSLSLSPGK

SEQ ID NO: 175 - protein, 217 aa, Artificial Sequence
  source: /note="Description of Artificial Sequence: Synthetic polypeptide"
APEAAGGPSVFLFPPKPKDTLMISRTPEVTCVVVDVSHEDPEVKFNWYVDGVEVHNAKTKPREEQYNSTYRVVSVLTVLHQDWLNGKEYKCKVSNKALGAPIEKTISKAKGQPREPQVYTLPPSRDELTKNQVSLWCLVKGFYPSDIAVEWESYGTEWSNYKTTPPVLDSDGSFFLYSKLTVSKEEWQQGFVFSCSVMHEALHNHYTQKSLSLSPGK

SEQ ID NO: 176 - protein, 217 aa, Artificial Sequence
  source: /note="Description of Artificial Sequence: Synthetic polypeptide"
APELLGGPSVFLFPPKPKDTLYITREPEVTCVVVDVSHEDPEVKFNWYVDGVEVHNAKTKPREEQYNSTYRVVSVLTVLHQDWLNGKEYKCKVSNKALPAPIEKTISKAKGQPREPQVYTLPPSRDELTKNQVSLWCLVKGFYPSDIAVEWESYGTEWSNYKTTPPVLDSDGSFFLYSKLTVSKEEWQQGFVFSCSVMHEALHNHYTQKSLSLSPGK

SEQ ID NO: 177 - protein, 217 aa, Artificial Sequence
  source: /note="Description of Artificial Sequence: Synthetic polypeptide"
APEAAGGPSVFLFPPKPKDTLYITREPEVTCVVVDVSHEDPEVKFNWYVDGVEVHNAKTKPREEQYNSTYRVVSVLTVLHQDWLNGKEYKCKVSNKALPAPIEKTISKAKGQPREPQVYTLPPSRDELTKNQVSLWCLVKGFYPSDIAVEWESYGTEWSNYKTTPPVLDSDGSFFLYSKLTVSKEEWQQGFVFSCSVMHEALHNHYTQKSLSLSPGK

SEQ ID NO: 178 - protein, 217 aa, Artificial Sequence
  source: /note="Description of Artificial Sequence: Synthetic polypeptide"
APEAAGGPSVFLFPPKPKDTLYITREPEVTCVVVDVSHEDPEVKFNWYVDGVEVHNAKTKPREEQYNSTYRVVSVLTVLHQDWLNGKEYKCKVSNKALGAPIEKTISKAKGQPREPQVYTLPPSRDELTKNQVSLWCLVKGFYPSDIAVEWESYGTEWSNYKTTPPVLDSDGSFFLYSKLTVSKEEWQQGFVFSCSVMHEALHNHYTQKSLSLSPGK

SEQ ID NO: 179 - protein, 217 aa, Artificial Sequence
  source: /note="Description of Artificial Sequence: Synthetic polypeptide"
APELLGGPSVFLFPPKPKDTLMISRTPEVTCVVVDVSHEDPEVKFNWYVDGVEVHNAKTKPREEQYNSTYRVVSVLTVLHQDWLNGKEYKCKVSNKALPAPIEKTISKAKGQPREPQVYTLPPSRDELTKNQVSLSCAVKGFYPSDIAVEWESYGTEWSNYKTTPPVLDSDGSFFLVSKLTVSKEEWQQGFVFSCSVMHEALHNHYTQKSLSLSPGK

SEQ ID NO: 180 - protein, 217 aa, Artificial Sequence
  source: /note="Description of Artificial Sequence: Synthetic polypeptide"
APEAAGGPSVFLFPPKPKDTLMISRTPEVTCVVVDVSHEDPEVKFNWYVDGVEVHNAKTKPREEQYNSTYRVVSVLTVLHQDWLNGKEYKCKVSNKALPAPIEKTISKAKGQPREPQVYTLPPSRDELTKNQVSLSCAVKGFYPSDIAVEWESYGTEWSNYKTTPPVLDSDGSFFLVSKLTVSKEEWQQGFVFSCSVMHEALHNHYTQKSLSLSPGK

SEQ ID NO: 181 - protein, 217 aa, Artificial Sequence
  source: /note="Description of Artificial Sequence: Synthetic polypeptide"
APEAAGGPSVFLFPPKPKDTLMISRTPEVTCVVVDVSHEDPEVKFNWYVDGVEVHNAKTKPREEQYNSTYRVVSVLTVLHQDWLNGKEYKCKVSNKALGAPIEKTISKAKGQPREPQVYTLPPSRDELTKNQVSLSCAVKGFYPSDIAVEWESYGTEWSNYKTTPPVLDSDGSFFLVSKLTVSKEEWQQGFVFSCSVMHEALHNHYTQKSLSLSPGK

SEQ ID NO: 182 - protein, 217 aa, Artificial Sequence
  source: /note="Description of Artificial Sequence: Synthetic polypeptide"
APELLGGPSVFLFPPKPKDTLYITREPEVTCVVVDVSHEDPEVKFNWYVDGVEVHNAKTKPREEQYNSTYRVVSVLTVLHQDWLNGKEYKCKVSNKALPAPIEKTISKAKGQPREPQVYTLPPSRDELTKNQVSLSCAVKGFYPSDIAVEWESYGTEWSNYKTTPPVLDSDGSFFLVSKLTVSKEEWQQGFVFSCSVMHEALHNHYTQKSLSLSPGK

SEQ ID NO: 183 - protein, 217 aa, Artificial Sequence
  source: /note="Description of Artificial Sequence: Synthetic polypeptide"
APEAAGGPSVFLFPPKPKDTLYITREPEVTCVVVDVSHEDPEVKFNWYVDGVEVHNAKTKPREEQYNSTYRVVSVLTVLHQDWLNGKEYKCKVSNKALPAPIEKTISKAKGQPREPQVYTLPPSRDELTKNQVSLSCAVKGFYPSDIAVEWESYGTEWSNYKTTPPVLDSDGSFFLVSKLTVSKEEWQQGFVFSCSVMHEALHNHYTQKSLSLSPGK

SEQ ID NO: 184 - protein, 217 aa, Artificial Sequence
  source: /note="Description of Artificial Sequence: Synthetic polypeptide"
APEAAGGPSVFLFPPKPKDTLYITREPEVTCVVVDVSHEDPEVKFNWYVDGVEVHNAKTKPREEQYNSTYRVVSVLTVLHQDWLNGKEYKCKVSNKALGAPIEKTISKAKGQPREPQVYTLPPSRDELTKNQVSLSCAVKGFYPSDIAVEWESYGTEWSNYKTTPPVLDSDGSFFLVSKLTVSKEEWQQGFVFSCSVMHEALHNHYTQKSLSLSPGK

SEQ ID NO: 185 - protein, 217 aa, Artificial Sequence
  source: /note="Description of Artificial Sequence: Synthetic polypeptide"
APELLGGPSVFLFPPKPKDTLMISRTPEVTCVVVDVSHEDPEVKFNWYVDGVEVHNAKTKPREEQYNSTYRVVSVLTVLHQDWLNGKEYKCKVSNKALPAPIEKTISKAKGQPREPQVYTLPPSRDELTKNQVSLWCLVKGFYPSDIAVLWESYGTEWASYKTTPPVLDSDGSFFLYSKLTVTKEEWQQGFVFSCSVMHEALHNHYTQKSLSLSPGK

SEQ ID NO: 186 - protein, 217 aa, Artificial Sequence
  source: /note="Description of Artificial Sequence: Synthetic polypeptide"
APEAAGGPSVFLFPPKPKDTLMISRTPEVTCVVVDVSHEDPEVKFNWYVDGVEVHNAKTKPREEQYNSTYRVVSVLTVLHQDWLNGKEYKCKVSNKALPAPIEKTISKAKGQPREPQVYTLPPSRDELTKNQVSLWCLVKGFYPSDIAVLWESYGTEWASYKTTPPVLDSDGSFFLYSKLTVTKEEWQQGFVFSCSVMHEALHNHYTQKSLSLSPGK

SEQ ID NO: 187 - protein, 217 aa, Artificial Sequence
  source: /note="Description of Artificial Sequence: Synthetic polypeptide"
APEAAGGPSVFLFPPKPKDTLMISRTPEVTCVVVDVSHEDPEVKFNWYVDGVEVHNAKTKPREEQYNSTYRVVSVLTVLHQDWLNGKEYKCKVSNKALGAPIEKTISKAKGQPREPQVYTLPPSRDELTKNQVSLWCLVKGFYPSDIAVLWESYGTEWASYKTTPPVLDSDGSFFLYSKLTVTKEEWQQGFVFSCSVMHEALHNHYTQKSLSLSPGK

SEQ ID NO: 188 - protein, 217 aa, Artificial Sequence
  source: /note="Description of Artificial Sequence: Synthetic polypeptide"
APELLGGPSVFLFPPKPKDTLYITREPEVTCVVVDVSHEDPEVKFNWYVDGVEVHNAKTKPREEQYNSTYRVVSVLTVLHQDWLNGKEYKCKVSNKALPAPIEKTISKAKGQPREPQVYTLPPSRDELTKNQVSLWCLVKGFYPSDIAVLWESYGTEWASYKTTPPVLDSDGSFFLYSKLTVTKEEWQQGFVFSCSVMHEALHNHYTQKSLSLSPGK

SEQ ID NO: 189 - protein, 217 aa, Artificial Sequence
  source: /note="Description of Artificial Sequence: Synthetic polypeptide"
APEAAGGPSVFLFPPKPKDTLYITREPEVTCVVVDVSHEDPEVKFNWYVDGVEVHNAKTKPREEQYNSTYRVVSVLTVLHQDWLNGKEYKCKVSNKALPAPIEKTISKAKGQPREPQVYTLPPSRDELTKNQVSLWCLVKGFYPSDIAVLWESYGTEWASYKTTPPVLDSDGSFFLYSKLTVTKEEWQQGFVFSCSVMHEALHNHYTQKSLSLSPGK

SEQ ID NO: 190 - protein, 217 aa, Artificial Sequence
  source: /note="Description of Artificial Sequence: Synthetic polypeptide"
APEAAGGPSVFLFPPKPKDTLYITREPEVTCVVVDVSHEDPEVKFNWYVDGVEVHNAKTKPREEQYNSTYRVVSVLTVLHQDWLNGKEYKCKVSNKALGAPIEKTISKAKGQPREPQVYTLPPSRDELTKNQVSLWCLVKGFYPSDIAVLWESYGTEWASYKTTPPVLDSDGSFFLYSKLTVTKEEWQQGFVFSCSVMHEALHNHYTQKSLSLSPGK

SEQ ID NO: 191 - protein, 217 aa, Artificial Sequence
  source: /note="Description of Artificial Sequence: Synthetic polypeptide"
APELLGGPSVFLFPPKPKDTLMISRTPEVTCVVVDVSHEDPEVKFNWYVDGVEVHNAKTKPREEQYNSTYRVVSVLTVLHQDWLNGKEYKCKVSNKALPAPIEKTISKAKGQPREPQVYTLPPSRDELTKNQVSLSCAVKGFYPSDIAVLWESYGTEWASYKTTPPVLDSDGSFFLVSKLTVTKEEWQQGFVFSCSVMHEALHNHYTQKSLSLSPGK

SEQ ID NO: 192 - protein, 217 aa, Artificial Sequence
  source: /note="Description of Artificial Sequence: Synthetic polypeptide"
APEAAGGPSVFLFPPKPKDTLMISRTPEVTCVVVDVSHEDPEVKFNWYVDGVEVHNAKTKPREEQYNSTYRVVSVLTVLHQDWLNGKEYKCKVSNKALPAPIEKTISKAKGQPREPQVYTLPPSRDELTKNQVSLSCAVKGFYPSDIAVLWESYGTEWASYKTTPPVLDSDGSFFLVSKLTVTKEEWQQGFVFSCSVMHEALHNHYTQKSLSLSPGK

SEQ ID NO: 193 - protein, 217 aa, Artificial Sequence
  source: /note="Description of Artificial Sequence: Synthetic polypeptide"
APEAAGGPSVFLFPPKPKDTLMISRTPEVTCVVVDVSHEDPEVKFNWYVDGVEVHNAKTKPREEQYNSTYRVVSVLTVLHQDWLNGKEYKCKVSNKALGAPIEKTISKAKGQPREPQVYTLPPSRDELTKNQVSLSCAVKGFYPSDIAVLWESYGTEWASYKTTPPVLDSDGSFFLVSKLTVTKEEWQQGFVFSCSVMHEALHNHYTQKSLSLSPGK

SEQ ID NO: 194 - protein, 217 aa, Artificial Sequence
  source: /note="Description of Artificial Sequence: Synthetic polypeptide"
APELLGGPSVFLFPPKPKDTLYITREPEVTCVVVDVSHEDPEVKFNWYVDGVEVHNAKTKPREEQYNSTYRVVSVLTVLHQDWLNGKEYKCKVSNKALPAPIEKTISKAKGQPREPQVYTLPPSRDELTKNQVSLSCAVKGFYPSDIAVLWESYGTEWASYKTTPPVLDSDGSFFLVSKLTVTKEEWQQGFVFSCSVMHEALHNHYTQKSLSLSPGK

SEQ ID NO: 195 - protein, 217 aa, Artificial Sequence
  source: /note="Description of Artificial Sequence: Synthetic polypeptide"
APEAAGGPSVFLFPPKPKDTLYITREPEVTCVVVDVSHEDPEVKFNWYVDGVEVHNAKTKPREEQYNSTYRVVSVLTVLHQDWLNGKEYKCKVSNKALPAPIEKTISKAKGQPREPQVYTLPPSRDELTKNQVSLSCAVKGFYPSDIAVLWESYGTEWASYKTTPPVLDSDGSFFLVSKLTVTKEEWQQGFVFSCSVMHEALHNHYTQKSLSLSPGK

SEQ ID NO: 196 - protein, 217 aa, Artificial Sequence
  source: /note="Description of Artificial Sequence: Synthetic polypeptide"
APEAAGGPSVFLFPPKPKDTLYITREPEVTCVVVDVSHEDPEVKFNWYVDGVEVHNAKTKPREEQYNSTYRVVSVLTVLHQDWLNGKEYKCKVSNKALGAPIEKTISKAKGQPREPQVYTLPPSRDELTKNQVSLSCAVKGFYPSDIAVLWESYGTEWASYKTTPPVLDSDGSFFLVSKLTVTKEEWQQGFVFSCSVMHEALHNHYTQKSLSLSPGK

SEQ ID NO: 197 - protein, 217 aa, Artificial Sequence
  source: /note="Description of Artificial Sequence: Synthetic polypeptide"
APELLGGPSVFLFPPKPKDTLMISRTPEVTCVVVDVSHEDPEVKFNWYVDGVEVHNAKTKPREEQYNSTYRVVSVLTVLHQDWLNGKEYKCKVSNKALPAPIEKTISKAKGQPREPQVYTLPPSRDELTKNQVSLWCLVKGFYPSDIAVEWESYGTEWSNYKTTPPVLDSDGSFFLYSKLTVTKEEWQQGFVFSCSVMHEALHNHYTQKSLSLSPGK

SEQ ID NO: 198 - protein, 217 aa, Artificial Sequence
  source: /note="Description of Artificial Sequence: Synthetic polypeptide"
APEAAGGPSVFLFPPKPKDTLMISRTPEVTCVVVDVSHEDPEVKFNWYVDGVEVHNAKTKPREEQYNSTYRVVSVLTVLHQDWLNGKEYKCKVSNKALPAPIEKTISKAKGQPREPQVYTLPPSRDELTKNQVSLWCLVKGFYPSDIAVEWESYGTEWSNYKTTPPVLDSDGSFFLYSKLTVTKEEWQQGFVFSCSVMHEALHNHYTQKSLSLSPGK

SEQ ID NO: 199 - protein, 217 aa, Artificial Sequence
  source: /note="Description of Artificial Sequence: Synthetic polypeptide"
APEAAGGPSVFLFPPKPKDTLMISRTPEVTCVVVDVSHEDPEVKFNWYVDGVEVHNAKTKPREEQYNSTYRVVSVLTVLHQDWLNGKEYKCKVSNKALGAPIEKTISKAKGQPREPQVYTLPPSRDELTKNQVSLWCLVKGFYPSDIAVEWESYGTEWSNYKTTPPVLDSDGSFFLYSKLTVTKEEWQQGFVFSCSVMHEALHNHYTQKSLSLSPGK

SEQ ID NO: 200 - protein, 217 aa, Artificial Sequence
  source: /note="Description of Artificial Sequence: Synthetic polypeptide"
APELLGGPSVFLFPPKPKDTLYITREPEVTCVVVDVSHEDPEVKFNWYVDGVEVHNAKTKPREEQYNSTYRVVSVLTVLHQDWLNGKEYKCKVSNKALPAPIEKTISKAKGQPREPQVYTLPPSRDELTKNQVSLWCLVKGFYPSDIAVEWESYGTEWSNYKTTPPVLDSDGSFFLYSKLTVTKEEWQQGFVFSCSVMHEALHNHYTQKSLSLSPGK

SEQ ID NO: 201 - protein, 217 aa, Artificial Sequence
  source: /note="Description of Artificial Sequence: Synthetic polypeptide"
APEAAGGPSVFLFPPKPKDTLYITREPEVTCVVVDVSHEDPEVKFNWYVDGVEVHNAKTKPREEQYNSTYRVVSVLTVLHQDWLNGKEYKCKVSNKALPAPIEKTISKAKGQPREPQVYTLPPSRDELTKNQVSLWCLVKGFYPSDIAVEWESYGTEWSNYKTTPPVLDSDGSFFLYSKLTVTKEEWQQGFVFSCSVMHEALHNHYTQKSLSLSPGK

SEQ ID NO: 202 - protein, 217 aa, Artificial Sequence
  source: /note="Description of Artificial Sequence: Synthetic polypeptide"
APEAAGGPSVFLFPPKPKDTLYITREPEVTCVVVDVSHEDPEVKFNWYVDGVEVHNAKTKPREEQYNSTYRVVSVLTVLHQDWLNGKEYKCKVSNKALGAPIEKTISKAKGQPREPQVYTLPPSRDELTKNQVSLWCLVKGFYPSDIAVEWESYGTEWSNYKTTPPVLDSDGSFFLYSKLTVTKEEWQQGFVFSCSVMHEALHNHYTQKSLSLSPGK

SEQ ID NO: 203 - protein, 217 aa, Artificial Sequence
  source: /note="Description of Artificial Sequence: Synthetic polypeptide"
APELLGGPSVFLFPPKPKDTLMISRTPEVTCVVVDVSHEDPEVKFNWYVDGVEVHNAKTKPREEQYNSTYRVVSVLTVLHQDWLNGKEYKCKVSNKALPAPIEKTISKAKGQPREPQVYTLPPSRDELTKNQVSLSCAVKGFYPSDIAVEWESYGTEWSNYKTTPPVLDSDGSFFLVSKLTVTKEEWQQGFVFSCSVMHEALHNHYTQKSLSLSPGK

SEQ ID NO: 204 - protein, 217 aa, Artificial Sequence
  source: /note="Description of Artificial Sequence: Synthetic polypeptide"
APEAAGGPSVFLFPPKPKDTLMISRTPEVTCVVVDVSHEDPEVKFNWYVDGVEVHNAKTKPREEQYNSTYRVVSVLTVLHQDWLNGKEYKCKVSNKALPAPIEKTISKAKGQPREPQVYTLPPSRDELTKNQVSLSCAVKGFYPSDIAVEWESYGTEWSNYKTTPPVLDSDGSFFLVSKLTVTKEEWQQGFVFSCSVMHEALHNHYTQKSLSLSPGK

SEQ ID NO: 205 - protein, 217 aa, Artificial Sequence
  source: /note="Description of Artificial Sequence: Synthetic polypeptide"
APEAAGGPSVFLFPPKPKDTLMISRTPEVTCVVVDVSHEDPEVKFNWYVDGVEVHNAKTKPREEQYNSTYRVVSVLTVLHQDWLNGKEYKCKVSNKALGAPIEKTISKAKGQPREPQVYTLPPSRDELTKNQVSLSCAVKGFYPSDIAVEWESYGTEWSNYKTTPPVLDSDGSFFLVSKLTVTKEEWQQGFVFSCSVMHEALHNHYTQKSLSLSPGK

SEQ ID NO: 206 - protein, 217 aa, Artificial Sequence
  source: /note="Description of Artificial Sequence: Synthetic polypeptide"
APELLGGPSVFLFPPKPKDTLYITREPEVTCVVVDVSHEDPEVKFNWYVDGVEVHNAKTKPREEQYNSTYRVVSVLTVLHQDWLNGKEYKCKVSNKALPAPIEKTISKAKGQPREPQVYTLPPSRDELTKNQVSLSCAVKGFYPSDIAVEWESYGTEWSNYKTTPPVLDSDGSFFLVSKLTVTKEEWQQGFVFSCSVMHEALHNHYTQKSLSLSPGK

SEQ ID NO: 207 - protein, 217 aa, Artificial Sequence
  source: /note="Description of Artificial Sequence: Synthetic polypeptide"
APEAAGGPSVFLFPPKPKDTLYITREPEVTCVVVDVSHEDPEVKFNWYVDGVEVHNAKTKPREEQYNSTYRVVSVLTVLHQDWLNGKEYKCKVSNKALPAPIEKTISKAKGQPREPQVYTLPPSRDELTKNQVSLSCAVKGFYPSDIAVEWESYGTEWSNYKTTPPVLDSDGSFFLVSKLTVTKEEWQQGFVFSCSVMHEALHNHYTQKSLSLSPGK

SEQ ID NO: 208 - protein, 217 aa, Artificial Sequence
  source: /note="Description of Artificial Sequence: Synthetic polypeptide"
APEAAGGPSVFLFPPKPKDTLYITREPEVTCVVVDVSHEDPEVKFNWYVDGVEVHNAKTKPREEQYNSTYRVVSVLTVLHQDWLNGKEYKCKVSNKALGAPIEKTISKAKGQPREPQVYTLPPSRDELTKNQVSLSCAVKGFYPSDIAVEWESYGTEWSNYKTTPPVLDSDGSFFLVSKLTVTKEEWQQGFVFSCSVMHEALHNHYTQKSLSLSPGK

SEQ ID NO: 209 - protein, 227 aa, Artificial Sequence
  source: /note="Description of Artificial Sequence: Synthetic polypeptide"
DKTHTCPPCPAPEAAGGPSVFLFPPKPKDTLMISRTPEVTCVVVDVSHEDPEVKFNWYVDGVEVHNAKTKPREEQYNSTYRVVSVLTVLHQDWLNGKEYKCKVSNKALPAPIEKTISKAKGQPREPQVYTLPPSRDELTKNQVSLWCLVKGFYPSDIAVLWESYGTEWASYKTTPPVLDSDGSFFLYSKLTVTKEEWQQGFVFSCSVMHEALHNHYTQKSLSLSPGK

SEQ ID NO: 210 - protein, 227 aa, Artificial Sequence
  source: /note="Description of Artificial Sequence: Synthetic polypeptide"
DKTHTCPPCPAPEAAGGPSVFLFPPKPKDTLMISRTPEVTCVVVDVSHEDPEVKFNWYVDGVEVHNAKTKPREEQYNSTYRVVSVLTVLHQDWLNGKEYKCKVSNKALPAPIEKTISKAKGQPREPQVYTLPPSRDELTKNQVSLWCLVKGFYPSDIAVEWESYGTEWANYKTTPPVLDSDGSFFLYSKLTVTKEEWQQGFVFSCSVMHEALHNHYTQKSLSLSPGK

SEQ ID NO: 211 - protein, 593 aa, Homo sapiens
MWTLVSWVALTAGLVAGTRCPDGQFCPVACCLDPGGASYSCCRPLLDKWPTTLSRHLGGPCQVDAHCSAGHSCIFTVSGTSSCCPFPEAVACGDGHHCCPRGFHCSADGRSCFQRSGNNSVGAIQCPDSQFECPDFSTCCVMVDGSWGCCPMPQASCCEDRVHCCPHGAFCDLVHTRCITPTGTHPLAKKLPAQRTNRAVALSSSVMCPDARSRCPDGSTCCELPSGKYGCCPMPNATCCSDHLHCCPQDTVCDLIQSKCLSKENATTDLLTKLPAHTVGDVKCDMEVSCPDGYTCCRLQSGAWGCCPFTQAVCCEDHIHCCPAGFTCDTQKGTCEQGPHQVPWMEKAPAHLSLPDPQALKRDVPCDNVSSCPSSDTCCQLTSGEWGCCPIPEAVCCSDHQHCCPQGYTCVAEGQCQRGSEIVAGLEKMPARRASLSHPRDIGCDQHTSCPVGQTCCPSLGGSWACCQLPHAVCCEDRQHCCPAGYTCNVKARSCEKEVVSAQPATFLARSPHVGVKDVECGEGHFCHDNQTCCRDNRQGWACCPYRQGVCCADRRHCCPAGFRCAARGTKCLRREAPRWDAPLRDPALRQLL

SEQ ID NO: 212 - protein, 576 aa, Homo sapiens
TRCPDGQFCPVACCLDPGGASYSCCRPLLDKWPTTLSRHLGGPCQVDAHCSAGHSCIFTVSGTSSCCPFPEAVACGDGHHCCPRGFHCSADGRSCFQRSGNNSVGAIQCPDSQFECPDFSTCCVMVDGSWGCCPMPQASCCEDRVHCCPHGAFCDLVHTRCITPTGTHPLAKKLPAQRTNRAVALSSSVMCPDARSRCPDGSTCCELPSGKYGCCPMPNATCCSDHLHCCPQDTVCDLIQSKCLSKENATTDLLTKLPAHTVGDVKCDMEVSCPDGYTCCRLQSGAWGCCPFTQAVCCEDHIHCCPAGFTCDTQKGTCEQGPHQVPWMEKAPAHLSLPDPQALKRDVPCDNVSSCPSSDTCCQLTSGEWGCCPIPEAVCCSDHQHCCPQGYTCVAEGQCQRGSEIVAGLEKMPARRASLSHPRDIGCDQHTSCPVGQTCCPSLGGSWACCQLPHAVCCEDRQHCCPAGYTCNVKARSCEKEVVSAQPATFLARSPHVGVKDVECGEGHFCHDNQTCCRDNRQGWACCPYRQGVCCADRRHCCPAGFRCAARGTKCLRREAPRWDAPLRDPALRQLL

SEQ ID NO: 213 - protein, 813 aa, Artificial Sequence
  source: /note="Description of Artificial Sequence: Synthetic polypeptide"
DKTHTCPPCPAPELLGGPSVFLFPPKPKDTLMISRTPEVTCVVVDVSHEDPEVKFNWYVDGVEVHNAKTKPREEQYNSTYRVVSVLTVLHQDWLNGKEYKCKVSNKALPAPIEKTISKAKGQPREPQVYTLPPSRDELTKNQVSLSCAVKGFYPSDIAVEWESNGQPENNYKTTPPVLDSDGSFFLVSKLTVDKSRWQQGNVFSCSVMHEALHNHYTQKSLSLSPGKGGGGSGGGGSTRCPDGQFCPVACCLDPGGASYSCCRPLLDKWPTTLSRHLGGPCQVDAHCSAGHSCIFTVSGTSSCCPFPEAVACGDGHHCCPRGFHCSADGRSCFQRSGNNSVGAIQCPDSQFECPDFSTCCVMVDGSWGCCPMPQASCCEDRVHCCPHGAFCDLVHTRCITPTGTHPLAKKLPAQRTNRAVALSSSVMCPDARSRCPDGSTCCELPSGKYGCCPMPNATCCSDHLHCCPQDTVCDLIQSKCLSKENATTDLLTKLPAHTVGDVKCDMEVSCPDGYTCCRLQSGAWGCCPFTQAVCCEDHIHCCPAGFTCDTQKGTCEQGPHQVPWMEKAPAHLSLPDPQALKRDVPCDNVSSCPSSDTCCQLTSGEWGCCPIPEAVCCSDHQHCCPQGYTCVAEGQCQRGSEIVAGLEKMPARRASLSHPRDIGCDQHTSCPVGQTCCPSLGGSWACCQLPHAVCCEDRQHCCPAGYTCNVKARSCEKEVVSAQPATFLARSPHVGVKDVECGEGHFCHDNQTCCRDNRQGWACCPYRQGVCCADRRHCCPAGFRCAARGTKCLRREAPRWDAPLRDPALRQLL

SEQ ID NO: 214 - protein, 808 aa, Artificial Sequence
  source: /note="Description of Artificial Sequence: Synthetic polypeptide"
DKTHTCPPCPAPELLGGPSVFLFPPKPKDTLMISRTPEVTCVVVDVSHEDPEVKFNWYVDGVEVHNAKTKPREEQYNSTYRVVSVLTVLHQDWLNGKEYKCKVSNKALPAPIEKTISKAKGQPREPQVYTLPPSRDELTKNQVSLSCAVKGFYPSDIAVEWESNGQPENNYKTTPPVLDSDGSFFLVSKLTVDKSRWQQGNVFSCSVMHEALHNHYTQKSLSLSPGKGGGGSTRCPDGQFCPVACCLDPGGASYSCCRPLLDKWPTTLSRHLGGPCQVDAHCSAGHSCIFTVSGTSSCCPFPEAVACGDGHHCCPRGFHCSADGRSCFQRSGNNSVGAIQCPDSQFECPDFSTCCVMVDGSWGCCPMPQASCCEDRVHCCPHGAFCDLVHTRCITPTGTHPLAKKLPAQRTNRAVALSSSVMCPDARSRCPDGSTCCELPSGKYGCCPMPNATCCSDHLHCCPQDTVCDLIQSKCLSKENATTDLLTKLPAHTVGDVKCDMEVSCPDGYTCCRLQSGAWGCCPFTQAVCCEDHIHCCPAGFTCDTQKGTCEQGPHQVPWMEKAPAHLSLPDPQALKRDVPCDNVSSCPSSDTCCQLTSGEWGCCPIPEAVCCSDHQHCCPQGYTCVAEGQCQRGSEIVAGLEKMPARRASLSHPRDIGCDQHTSCPVGQTCCPSLGGSWACCQLPHAVCCEDRQHCCPAGYTCNVKARSCEKEVVSAQPATFLARSPHVGVKDVECGEGHFCHDNQTCCRDNRQGWACCPYRQGVCCADRRHCCPAGFRCAARGTKCLRREAPRWDAPLRDPALRQLL

SEQ ID NO: 215 - protein, 813 aa, Artificial Sequence
  source: /note="Description of Artificial Sequence: Synthetic polypeptide"
DKTHTCPPCPAPEAAGGPSVFLFPPKPKDTLMISRTPEVTCVVVDVSHEDPEVKFNWYVDGVEVHNAKTKPREEQYNSTYRVVSVLTVLHQDWLNGKEYKCKVSNKALPAPIEKTISKAKGQPREPQVYTLPPSRDELTKNQVSLSCAVKGFYPSDIAVEWESNGQPENNYKTTPPVLDSDGSFFLVSKLTVDKSRWQQGNVFSCSVMHEALHNHYTQKSLSLSPGKGGGGSGGGGSTRCPDGQFCPVACCLDPGGASYSCCRPLLDKWPTTLSRHLGGPCQVDAHCSAGHSCIFTVSGTSSCCPFPEAVACGDGHHCCPRGFHCSADGRSCFQRSGNNSVGAIQCPDSQFECPDFSTCCVMVDGSWGCCPMPQASCCEDRVHCCPHGAFCDLVHTRCITPTGTHPLAKKLPAQRTNRAVALSSSVMCPDARSRCPDGSTCCELPSGKYGCCPMPNATCCSDHLHCCPQDTVCDLIQSKCLSKENATTDLLTKLPAHTVGDVKCDMEVSCPDGYTCCRLQSGAWGCCPFTQAVCCEDHIHCCPAGFTCDTQKGTCEQGPHQVPWMEKAPAHLSLPDPQALKRDVPCDNVSSCPSSDTCCQLTSGEWGCCPIPEAVCCSDHQHCCPQGYTCVAEGQCQRGSEIVAGLEKMPARRASLSHPRDIGCDQHTSCPVGQTCCPSLGGSWACCQLPHAVCCEDRQHCCPAGYTCNVKARSCEKEVVSAQPATFLARSPHVGVKDVECGEGHFCHDNQTCCRDNRQGWACCPYRQGVCCADRRHCCPAGFRCAARGTKCLRREAPRWDAPLRDPALRQLL

SEQ ID NO: 216 - protein, 808 aa, Artificial Sequence
  source: /note="Description of Artificial Sequence: Synthetic polypeptide"
DKTHTCPPCPAPEAAGGPSVFLFPPKPKDTLMISRTPEVTCVVVDVSHEDPEVKFNWYVDGVEVHNAKTKPREEQYNSTYRVVSVLTVLHQDWLNGKEYKCKVSNKALPAPIEKTISKAKGQPREPQVYTLPPSRDELTKNQVSLSCAVKGFYPSDIAVEWESNGQPENNYKTTPPVLDSDGSFFLVSKLTVDKSRWQQGNVFSCSVMHEALHNHYTQKSLSLSPGKGGGGSTRCPDGQFCPVACCLDPGGASYSCCRPLLDKWPTTLSRHLGGPCQVDAHCSAGHSCIFTVSGTSSCCPFPEAVACGDGHHCCPRGFHCSADGRSCFQRSGNNSVGAIQCPDSQFECPDFSTCCVMVDGSWGCCPMPQASCCEDRVHCCPHGAFCDLVHTRCITPTGTHPLAKKLPAQRTNRAVALSSSVMCPDARSRCPDGSTCCELPSGKYGCCPMPNATCCSDHLHCCPQDTVCDLIQSKCLSKENATTDLLTKLPAHTVGDVKCDMEVSCPDGYTCCRLQSGAWGCCPFTQAVCCEDHIHCCPAGFTCDTQKGTCEQGPHQVPWMEKAPAHLSLPDPQALKRDVPCDNVSSCPSSDTCCQLTSGEWGCCPIPEAVCCSDHQHCCPQGYTCVAEGQCQRGSEIVAGLEKMPARRASLSHPRDIGCDQHTSCPVGQTCCPSLGGSWACCQLPHAVCCEDRQHCCPAGYTCNVKARSCEKEVVSAQPATFLARSPHVGVKDVECGEGHFCHDNQTCCRDNRQGWACCPYRQGVCCADRRHCCPAGFRCAARGTKCLRREAPRWDAPLRDPALRQLL

SEQ ID NO: 217 - protein, 813 aa, Artificial Sequence
  source: /note="Description of Artificial Sequence: Synthetic polypeptide"
DKTHTCPPCPAPEAAGGPSVFLFPPKPKDTLMISRTPEVTCVVVDVSHEDPEVKFNWYVDGVEVHNAKTKPREEQYNSTYRVVSVLTVLHQDWLNGKEYKCKVSNKALGAPIEKTISKAKGQPREPQVYTLPPSRDELTKNQVSLSCAVKGFYPSDIAVEWESNGQPENNYKTTPPVLDSDGSFFLVSKLTVDKSRWQQGNVFSCSVMHEALHNHYTQKSLSLSPGKGGGGSGGGGSTRCPDGQFCPVACCLDPGGASYSCCRPLLDKWPTTLSRHLGGPCQVDAHCSAGHSCIFTVSGTSSCCPFPEAVACGDGHHCCPRGFHCSADGRSCFQRSGNNSVGAIQCPDSQFECPDFSTCCVMVDGSWGCCPMPQASCCEDRVHCCPHGAFCDLVHTRCITPTGTHPLAKKLPAQRTNRAVALSSSVMCPDARSRCPDGSTCCELPSGKYGCCPMPNATCCSDHLHCCPQDTVCDLIQSKCLSKENATTDLLTKLPAHTVGDVKCDMEVSCPDGYTCCRLQSGAWGCCPFTQAVCCEDHIHCCPAGFTCDTQKGTCEQGPHQVPWMEKAPAHLSLPDPQALKRDVPCDNVSSCPSSDTCCQLTSGEWGCCPIPEAVCCSDHQHCCPQGYTCVAEGQCQRGSEIVAGLEKMPARRASLSHPRDIGCDQHTSCPVGQTCCPSLGGSWACCQLPHAVCCEDRQHCCPAGYTCNVKARSCEKEVVSAQPATFLARSPHVGVKDVECGEGHFCHDNQTCCRDNRQGWACCPYRQGVCCADRRHCCPAGFRCAARGTKCLRREAPRWDAPLRDPALRQLL

SEQ ID NO: 218 - protein, 808 aa, Artificial Sequence
  source: /note="Description of Artificial Sequence: Synthetic polypeptide"
DKTHTCPPCPAPEAAGGPSVFLFPPKPKDTLMISRTPEVTCVVVDVSHEDPEVKFNWYVDGVEVHNAKTKPREEQYNSTYRVVSVLTVLHQDWLNGKEYKCKVSNKALGAPIEKTISKAKGQPREPQVYTLPPSRDELTKNQVSLSCAVKGFYPSDIAVEWESNGQPENNYKTTPPVLDSDGSFFLVSKLTVDKSRWQQGNVFSCSVMHEALHNHYTQKSLSLSPGKGGGGSTRCPDGQFCPVACCLDPGGASYSCCRPLLDKWPTTLSRHLGGPCQVDAHCSAGHSCIFTVSGTSSCCPFPEAVACGDGHHCCPRGFHCSADGRSCFQRSGNNSVGAIQCPDSQFECPDFSTCCVMVDGSWGCCPMPQASCCEDRVHCCPHGAFCDLVHTRCITPTGTHPLAKKLPAQRTNRAVALSSSVMCPDARSRCPDGSTCCELPSGKYGCCPMPNATCCSDHLHCCPQDTVCDLIQSKCLSKENATTDLLTKLPAHTVGDVKCDMEVSCPDGYTCCRLQSGAWGCCPFTQAVCCEDHIHCCPAGFTCDTQKGTCEQGPHQVPWMEKAPAHLSLPDPQALKRDVPCDNVSSCPSSDTCCQLTSGEWGCCPIPEAVCCSDHQHCCPQGYTCVAEGQCQRGSEIVAGLEKMPARRASLSHPRDIGCDQHTSCPVGQTCCPSLGGSWACCQLPHAVCCEDRQHCCPAGYTCNVKARSCEKEVVSAQPATFLARSPHVGVKDVECGEGHFCHDNQTCCRDNRQGWACCPYRQGVCCADRRHCCPAGFRCAARGTKCLRREAPRWDAPLRDPALRQLL

SEQ ID NO: 219 - protein, 813 aa, Artificial Sequence
  source: /note="Description of Artificial Sequence: Synthetic polypeptide"
DKTHTCPPCPAPELLGGPSVFLFPPKPKDTLMISRTPEVTCVVVDVSHEDPEVKFNWYVDGVEVHNAKTKPREEQYNSTYRVVSVLTVLHQDWLNGKEYKCKVSNKALPAPIEKTISKAKGQPREPQVYTLPPSRDELTKNQVSLSCAVKGFYPSDIAVEWESNGQPENNYKTTPPVLDSDGSFFLVSKLTVDKSRWQQGNVFSCSVLHEALHSHYTQKSLSLSPGKGGGGSGGGGSTRCPDGQFCPVACCLDPGGASYSCCRPLLDKWPTTLSRHLGGPCQVDAHCSAGHSCIFTVSGTSSCCPFPEAVACGDGHHCCPRGFHCSADGRSCFQRSGNNSVGAIQCPDSQFECPDFSTCCVMVDGSWGCCPMPQASCCEDRVHCCPHGAFCDLVHTRCITPTGTHPLAKKLPAQRTNRAVALSSSVMCPDARSRCPDGSTCCELPSGKYGCCPMPNATCCSDHLHCCPQDTVCDLIQSKCLSKENATTDLLTKLPAHTVGDVKCDMEVSCPDGYTCCRLQSGAWGCCPFTQAVCCEDHIHCCPAGFTCDTQKGTCEQGPHQVPWMEKAPAHLSLPDPQALKRDVPCDNVSSCPSSDTCCQLTSGEWGCCPIPEAVCCSDHQHCCPQGYTCVAEGQCQRGSEIVAGLEKMPARRASLSHPRDIGCDQHTSCPVGQTCCPSLGGSWACCQLPHAVCCEDRQHCCPAGYTCNVKARSCEKEVVSAQPATFLARSPHVGVKDVECGEGHFCHDNQTCCRDNRQGWACCPYRQGVCCADRRHCCPAGFRCAARGTKCLRREAPRWDAPLRDPALRQLL

SEQ ID NO: 220 - protein, 808 aa, Artificial Sequence
  source: /note="Description of Artificial Sequence: Synthetic polypeptide"
DKTHTCPPCPAPELLGGPSVFLFPPKPKDTLMISRTPEVTCVVVDVSHEDPEVKFNWYVDGVEVHNAKTKPREEQYNSTYRVVSVLTVLHQDWLNGKEYKCKVSNKALPAPIEKTISKAKGQPREPQVYTLPPSRDELTKNQVSLSCAVKGFYPSDIAVEWESNGQPENNYKTTPPVLDSDGSFFLVSKLTVDKSRWQQGNVFSCSVLHEALHSHYTQKSLSLSPGKGGGGSTRCPDGQFCPVACCLDPGGASYSCCRPLLDKWPTTLSRHLGGPCQVDAHCSAGHSCIFTVSGTSSCCPFPEAVACGDGHHCCPRGFHCSADGRSCFQRSGNNSVGAIQCPDSQFECPDFSTCCVMVDGSWGCCPMPQASCCEDRVHCCPHGAFCDLVHTRCITPTGTHPLAKKLPAQRTNRAVALSSSVMCPDARSRCPDGSTCCELPSGKYGCCPMPNATCCSDHLHCCPQDTVCDLIQSKCLSKENATTDLLTKLPAHTVGDVKCDMEVSCPDGYTCCRLQSGAWGCCPFTQAVCCEDHIHCCPAGFTCDTQKGTCEQGPHQVPWMEKAPAHLSLPDPQALKRDVPCDNVSSCPSSDTCCQLTSGEWGCCPIPEAVCCSDHQHCCPQGYTCVAEGQCQRGSEIVAGLEKMPARRASLSHPRDIGCDQHTSCPVGQTCCPSLGGSWACCQLPHAVCCEDRQHCCPAGYTCNVKARSCEKEVVSAQPATFLARSPHVGVKDVECGEGHFCHDNQTCCRDNRQGWACCPYRQGVCCADRRHCCPAGFRCAARGTKCLRREAPRWDAPLRDPALRQLL

SEQ ID NO: 221 - protein, 813 aa, Artificial Sequence
  source: /note="Description of Artificial Sequence: Synthetic polypeptide"
DKTHTCPPCPAPEAAGGPSVFLFPPKPKDTLMISRTPEVTCVVVDVSHEDPEVKFNWYVDGVEVHNAKTKPREEQYNSTYRVVSVLTVLHQDWLNGKEYKCKVSNKALPAPIEKTISKAKGQPREPQVYTLPPSRDELTKNQVSLSCAVKGFYPSDIAVEWESNGQPENNYKTTPPVLDSDGSFFLVSKLTVDKSRWQQGNVFSCSVLHEALHSHYTQKSLSLSPGKGGGGSGGGGSTRCPDGQFCPVACCLDPGGASYSCCRPLLDKWPTTLSRHLGGPCQVDAHCSAGHSCIFTVSGTSSCCPFPEAVACGDGHHCCPRGFHCSADGRSCFQRSGNNSVGAIQCPDSQFECPDFSTCCVMVDGSWGCCPMPQASCCEDRVHCCPHGAFCDLVHTRCITPTGTHPLAKKLPAQRTNRAVALSSSVMCPDARSRCPDGSTCCELPSGKYGCCPMPNATCCSDHLHCCPQDTVCDLIQSKCLSKENATTDLLTKLPAHTVGDVKCDMEVSCPDGYTCCRLQSGAWGCCPFTQAVCCEDHIHCCPAGFTCDTQKGTCEQGPHQVPWMEKAPAHLSLPDPQALKRDVPCDNVSSCPSSDTCCQLTSGEWGCCPIPEAVCCSDHQHCCPQGYTCVAEGQCQRGSEIVAGLEKMPARRASLSHPRDIGCDQHTSCPVGQTCCPSLGGSWACCQLPHAVCCEDRQHCCPAGYTCNVKARSCEKEVVSAQPATFLARSPHVGVKDVECGEGHFCHDNQTCCRDNRQGWACCPYRQGVCCADRRHCCPAGFRCAARGTKCLRREAPRWDAPLRDPALRQLL

SEQ ID NO: 222 - protein, 808 aa, Artificial Sequence
  source: /note="Description of Artificial Sequence: Synthetic polypeptide"
DKTHTCPPCPAPEAAGGPSVFLFPPKPKDTLMISRTPEVTCVVVDVSHEDPEVKFNWYVDGVEVHNAKTKPREEQYNSTYRVVSVLTVLHQDWLNGKEYKCKVSNKALPAPIEKTISKAKGQPREPQVYTLPPSRDELTKNQVSLSCAVKGFYPSDIAVEWESNGQPENNYKTTPPVLDSDGSFFLVSKLTVDKSRWQQGNVFSCSVLHEALHSHYTQKSLSLSPGKGGGGSTRCPDGQFCPVACCLDPGGASYSCCRPLLDKWPTTLSRHLGGPCQVDAHCSAGHSCIFTVSGTSSCCPFPEAVACGDGHHCCPRGFHCSADGRSCFQRSGNNSVGAIQCPDSQFECPDFSTCCVMVDGSWGCCPMPQASCCEDRVHCCPHGAFCDLVHTRCITPTGTHPLAKKLPAQRTNRAVALSSSVMCPDARSRCPDGSTCCELPSGKYGCCPMPNATCCSDHLHCCPQDTVCDLIQSKCLSKENATTDLLTKLPAHTVGDVKCDMEVSCPDGYTCCRLQSGAWGCCPFTQAVCCEDHIHCCPAGFTCDTQKGTCEQGPHQVPWMEKAPAHLSLPDPQALKRDVPCDNVSSCPSSDTCCQLTSGEWGCCPIPEAVCCSDHQHCCPQGYTCVAEGQCQRGSEIVAGLEKMPARRASLSHPRDIGCDQHTSCPVGQTCCPSLGGSWACCQLPHAVCCEDRQHCCPAGYTCNVKARSCEKEVVSAQPATFLARSPHVGVKDVECGEGHFCHDNQTCCRDNRQGWACCPYRQGVCCADRRHCCPAGFRCAARGTKCLRREAPRWDAPLRDPALRQLL

SEQ ID NO: 223 - protein, 813 aa, Artificial Sequence
  source: /note="Description of Artificial Sequence: Synthetic polypeptide"
DKTHTCPPCPAPEAAGGPSVFLFPPKPKDTLMISRTPEVTCVVVDVSHEDPEVKFNWYVDGVEVHNAKTKPREEQYNSTYRVVSVLTVLHQDWLNGKEYKCKVSNKALGAPIEKTISKAKGQPREPQVYTLPPSRDELTKNQVSLSCAVKGFYPSDIAVEWESNGQPENNYKTTPPVLDSDGSFFLVSKLTVDKSRWQQGNVFSCSVLHEALHSHYTQKSLSLSPGKGGGGSGGGGSTRCPDGQFCPVACCLDPGGASYSCCRPLLDKWPTTLSRHLGGPCQVDAHCSAGHSCIFTVSGTSSCCPFPEAVACGDGHHCCPRGFHCSADGRSCFQRSGNNSVGAIQCPDSQFECPDFSTCCVMVDGSWGCCPMPQASCCEDRVHCCPHGAFCDLVHTRCITPTGTHPLAKKLPAQRTNRAVALSSSVMCPDARSRCPDGSTCCELPSGKYGCCPMPNATCCSDHLHCCPQDTVCDLIQSKCLSKENATTDLLTKLPAHTVGDVKCDMEVSCPDGYTCCRLQSGAWGCCPFTQAVCCEDHIHCCPAGFTCDTQKGTCEQGPHQVPWMEKAPAHLSLPDPQALKRDVPCDNVSSCPSSDTCCQLTSGEWGCCPIPEAVCCSDHQHCCPQGYTCVAEGQCQRGSEIVAGLEKMPARRASLSHPRDIGCDQHTSCPVGQTCCPSLGGSWACCQLPHAVCCEDRQHCCPAGYTCNVKARSCEKEVVSAQPATFLARSPHVGVKDVECGEGHFCHDNQTCCRDNRQGWACCPYRQGVCCADRRHCCPAGFRCAARGTKCLRREAPRWDAPLRDPALRQLL

SEQ ID NO: 224 - protein, 808 aa, Artificial Sequence
  source: /note="Description of Artificial Sequence: Synthetic polypeptide"
DKTHTCPPCPAPEAAGGPSVFLFPPKPKDTLMISRTPEVTCVVVDVSHEDPEVKFNWYVDGVEVHNAKTKPREEQYNSTYRVVSVLTVLHQDWLNGKEYKCKVSNKALGAPIEKTISKAKGQPREPQVYTLPPSRDELTKNQVSLSCAVKGFYPSDIAVEWESNGQPENNYKTTPPVLDSDGSFFLVSKLTVDKSRWQQGNVFSCSVLHEALHSHYTQKSLSLSPGKGGGGSTRCPDGQFCPVACCLDPGGASYSCCRPLLDKWPTTLSRHLGGPCQVDAHCSAGHSCIFTVSGTSSCCPFPEAVACGDGHHCCPRGFHCSADGRSCFQRSGNNSVGAIQCPDSQFECPDFSTCCVMVDGSWGCCPMPQASCCEDRVHCCPHGAFCDLVHTRCITPTGTHPLAKKLPAQRTNRAVALSSSVMCPDARSRCPDGSTCCELPSGKYGCCPMPNATCCSDHLHCCPQDTVCDLIQSKCLSKENATTDLLTKLPAHTVGDVKCDMEVSCPDGYTCCRLQSGAWGCCPFTQAVCCEDHIHCCPAGFTCDTQKGTCEQGPHQVPWMEKAPAHLSLPDPQALKRDVPCDNVSSCPSSDTCCQLTSGEWGCCPIPEAVCCSDHQHCCPQGYTCVAEGQCQRGSEIVAGLEKMPARRASLSHPRDIGCDQHTSCPVGQTCCPSLGGSWACCQLPHAVCCEDRQHCCPAGYTCNVKARSCEKEVVSAQPATFLARSPHVGVKDVECGEGHFCHDNQTCCRDNRQGWACCPYRQGVCCADRRHCCPAGFRCAARGTKCLRREAPRWDAPLRDPALRQLL

SEQ ID NO: 225 - protein, 813 aa, Artificial Sequence
  source: /note="Description of Artificial Sequence: Synthetic polypeptide"
TRCPDGQFCPVACCLDPGGASYSCCRPLLDKWPTTLSRHLGGPCQVDAHCSAGHSCIFTVSGTSSCCPFPEAVACGDGHHCCPRGFHCSADGRSCFQRSGNNSVGAIQCPDSQFECPDFSTCCVMVDGSWGCCPMPQASCCEDRVHCCPHGAFCDLVHTRCITPTGTHPLAKKLPAQRTNRAVALSSSVMCPDARSRCPDGSTCCELPSGKYGCCPMPNATCCSDHLHCCPQDTVCDLIQSKCLSKENATTDLLTKLPAHTVGDVKCDMEVSCPDGYTCCRLQSGAWGCCPFTQAVCCEDHIHCCPAGFTCDTQKGTCEQGPHQVPWMEKAPAHLSLPDPQALKRDVPCDNVSSCPSSDTCCQLTSGEWGCCPIPEAVCCSDHQHCCPQGYTCVAEGQCQRGSEIVAGLEKMPARRASLSHPRDIGCDQHTSCPVGQTCCPSLGGSWACCQLPHAVCCEDRQHCCPAGYTCNVKARSCEKEVVSAQPATFLARSPHVGVKDVECGEGHFCHDNQTCCRDNRQGWACCPYRQGVCCADRRHCCPAGFRCAARGTKCLRREAPRWDAPLRDPALRQLLGGGGSGGGGSDKTHTCPPCPAPELLGGPSVFLFPPKPKDTLMISRTPEVTCVVVDVSHEDPEVKFNWYVDGVEVHNAKTKPREEQYNSTYRVVSVLTVLHQDWLNGKEYKCKVSNKALPAPIEKTISKAKGQPREPQVYTLPPSRDELTKNQVSLSCAVKGFYPSDIAVEWESNGQPENNYKTTPPVLDSDGSFFLVSKLTVDKSRWQQGNVFSCSVMHEALHNHYTQKSLSLSPGK

SEQ ID NO: 226 - protein, 808 aa, Artificial Sequence
  source: /note="Description of Artificial Sequence: Synthetic polypeptide"
TRCPDGQFCPVACCLDPGGASYSCCRPLLDKWPTTLSRHLGGPCQVDAHCSAGHSCIFTVSGTSSCCPFPEAVACGDGHHCCPRGFHCSADGRSCFQRSGNNSVGAIQCPDSQFECPDFSTCCVMVDGSWGCCPMPQASCCEDRVHCCPHGAFCDLVHTRCITPTGTHPLAKKLPAQRTNRAVALSSSVMCPDARSRCPDGSTCCELPSGKYGCCPMPNATCCSDHLHCCPQDTVCDLIQSKCLSKENATTDLLTKLPAHTVGDVKCDMEVSCPDGYTCCRLQSGAWGCCPFTQAVCCEDHIHCCPAGFTCDTQKGTCEQGPHQVPWMEKAPAHLSLPDPQALKRDVPCDNVSSCPSSDTCCQLTSGEWGCCPIPEAVCCSDHQHCCPQGYTCVAEGQCQRGSEIVAGLEKMPARRASLSHPRDIGCDQHTSCPVGQTCCPSLGGSWACCQLPHAVCCEDRQHCCPAGYTCNVKARSCEKEVVSAQPATFLARSPHVGVKDVECGEGHFCHDNQTCCRDNRQGWACCPYRQGVCCADRRHCCPAGFRCAARGTKCLRREAPRWDAPLRDPALRQLLGGGGSDKTHTCPPCPAPELLGGPSVFLFPPKPKDTLMISRTPEVTCVVVDVSHEDPEVKFNWYVDGVEVHNAKTKPREEQYNSTYRVVSVLTVLHQDWLNGKEYKCKVSNKALPAPIEKTISKAKGQPREPQVYTLPPSRDELTKNQVSLSCAVKGFYPSDIAVEWESNGQPENNYKTTPPVLDSDGSFFLVSKLTVDKSRWQQGNVFSCSVMHEALHNHYTQKSLSLSPGK

SEQ ID NO: 227 - protein, 813 aa, Artificial Sequence
  source: /note="Description of Artificial Sequence: Synthetic polypeptide"
TRCPDGQFCPVACCLDPGGASYSCCRPLLDKWPTTLSRHLGGPCQVDAHCSAGHSCIFTVSGTSSCCPFPEAVACGDGHHCCPRGFHCSADGRSCFQRSGNNSVGAIQCPDSQFECPDFSTCCVMVDGSWGCCPMPQASCCEDRVHCCPHGAFCDLVHTRCITPTGTHPLAKKLPAQRTNRAVALSSSVMCPDARSRCPDGSTCCELPSGKYGCCPMPNATCCSDHLHCCPQDTVCDLIQSKCLSKENATTDLLTKLPAHTVGDVKCDMEVSCPDGYTCCRLQSGAWGCCPFTQAVCCEDHIHCCPAGFTCDTQKGTCEQGPHQVPWMEKAPAHLSLPDPQALKRDVPCDNVSSCPSSDTCCQLTSGEWGCCPIPEAVCCSDHQHCCPQGYTCVAEGQCQRGSEIVAGLEKMPARRASLSHPRDIGCDQHTSCPVGQTCCPSLGGSWACCQLPHAVCCEDRQHCCPAGYTCNVKARSCEKEVVSAQPATFLARSPHVGVKDVECGEGHFCHDNQTCCRDNRQGWACCPYRQGVCCADRRHCCPAGFRCAARGTKCLRREAPRWDAPLRDPALRQLLGGGGSGGGGSDKTHTCPPCPAPEAAGGPSVFLFPPKPKDTLMISRTPEVTCVVVDVSHEDPEVKFNWYVDGVEVHNAKTKPREEQYNSTYRVVSVLTVLHQDWLNGKEYKCKVSNKALPAPIEKTISKAKGQPREPQVYTLPPSRDELTKNQVSLSCAVKGFYPSDIAVEWESNGQPENNYKTTPPVLDSDGSFFLVSKLTVDKSRWQQGNVFSCSVMHEALHNHYTQKSLSLSPGK

SEQ ID NO: 228 - protein, 808 aa, Artificial Sequence
  source: /note="Description of Artificial Sequence: Synthetic polypeptide"
TRCPDGQFCPVACCLDPGGASYSCCRPLLDKWPTTLSRHLGGPCQVDAHCSAGHSCIFTVSGTSSCCPFPEAVACGDGHHCCPRGFHCSADGRSCFQRSGNNSVGAIQCPDSQFECPDFSTCCVMVDGSWGCCPMPQASCCEDRVHCCPHGAFCDLVHTRCITPTGTHPLAKKLPAQRTNRAVALSSSVMCPDARSRCPDGSTCCELPSGKYGCCPMPNATCCSDHLHCCPQDTVCDLIQSKCLSKENATTDLLTKLPAHTVGDVKCDMEVSCPDGYTCCRLQSGAWGCCPFTQAVCCEDHIHCCPAGFTCDTQKGTCEQGPHQVPWMEKAPAHLSLPDPQALKRDVPCDNVSSCPSSDTCCQLTSGEWGCCPIPEAVCCSDHQHCCPQGYTCVAEGQCQRGSEIVAGLEKMPARRASLSHPRDIGCDQHTSCPVGQTCCPSLGGSWACCQLPHAVCCEDRQHCCPAGYTCNVKARSCEKEVVSAQPATFLARSPHVGVKDVECGEGHFCHDNQTCCRDNRQGWACCPYRQGVCCADRRHCCPAGFRCAARGTKCLRREAPRWDAPLRDPALRQLLGGGGSDKTHTCPPCPAPEAAGGPSVFLFPPKPKDTLMISRTPEVTCVVVDVSHEDPEVKFNWYVDGVEVHNAKTKPREEQYNSTYRVVSVLTVLHQDWLNGKEYKCKVSNKALPAPIEKTISKAKGQPREPQVYTLPPSRDELTKNQVSLSCAVKGFYPSDIAVEWESNGQPENNYKTTPPVLDSDGSFFLVSKLTVDKSRWQQGNVFSCSVMHEALHNHYTQKSLSLSPGK

SEQ ID NO: 229 - protein, 813 aa, Artificial Sequence
  source: /note="Description of Artificial Sequence: Synthetic polypeptide"
TRCPDGQFCPVACCLDPGGASYSCCRPLLDKWPTTLSRHLGGPCQVDAHCSAGHSCIFTVSGTSSCCPFPEAVACGDGHHCCPRGFHCSADGRSCFQRSGNNSVGAIQCPDSQFECPDFSTCCVMVDGSWGCCPMPQASCCEDRVHCCPHGAFCDLVHTRCITPTGTHPLAKKLPAQRTNRAVALSSSVMCPDARSRCPDGSTCCELPSGKYGCCPMPNATCCSDHLHCCPQDTVCDLIQSKCLSKENATTDLLTKLPAHTVGDVKCDMEVSCPDGYTCCRLQSGAWGCCPFTQAVCCEDHIHCCPAGFTCDTQKGTCEQGPHQVPWMEKAPAHLSLPDPQALKRDVPCDNVSSCPSSDTCCQLTSGEWGCCPIPEAVCCSDHQHCCPQGYTCVAEGQCQRGSEIVAGLEKMPARRASLSHPRDIGCDQHTSCPVGQTCCPSLGGSWACCQLPHAVCCEDRQHCCPAGYTCNVKARSCEKEVVSAQPATFLARSPHVGVKDVECGEGHFCHDNQTCCRDNRQGWACCPYRQGVCCADRRHCCPAGFRCAARGTKCLRREAPRWDAPLRDPALRQLLGGGGSGGGGSDKTHTCPPCPAPEAAGGPSVFLFPPKPKDTLMISRTPEVTCVVVDVSHEDPEVKFNWYVDGVEVHNAKTKPREEQYNSTYRVVSVLTVLHQDWLNGKEYKCKVSNKALGAPIEKTISKAKGQPREPQVYTLPPSRDELTKNQVSLSCAVKGFYPSDIAVEWESNGQPENNYKTTPPVLDSDGSFFLVSKLTVDKSRWQQGNVFSCSVMHEALHNHYTQKSLSLSPGK

SEQ ID NO: 230 - protein, 808 aa, Artificial Sequence
  source: /note="Description of Artificial Sequence: Synthetic polypeptide"
TRCPDGQFCPVACCLDPGGASYSCCRPLLDKWPTTLSRHLGGPCQVDAHCSAGHSCIFTVSGTSSCCPFPEAVACGDGHHCCPRGFHCSADGRSCFQRSGNNSVGAIQCPDSQFECPDFSTCCVMVDGSWGCCPMPQASCCEDRVHCCPHGAFCDLVHTRCITPTGTHPLAKKLPAQRTNRAVALSSSVMCPDARSRCPDGSTCCELPSGKYGCCPMPNATCCSDHLHCCPQDTVCDLIQSKCLSKENATTDLLTKLPAHTVGDVKCDMEVSCPDGYTCCRLQSGAWGCCPFTQAVCCEDHIHCCPAGFTCDTQKGTCEQGPHQVPWMEKAPAHLSLPDPQALKRDVPCDNVSSCPSSDTCCQLTSGEWGCCPIPEAVCCSDHQHCCPQGYTCVAEGQCQRGSEIVAGLEKMPARRASLSHPRDIGCDQHTSCPVGQTCCPSLGGSWACCQLPHAVCCEDRQHCCPAGYTCNVKARSCEKEVVSAQPATFLARSPHVGVKDVECGEGHFCHDNQTCCRDNRQGWACCPYRQGVCCADRRHCCPAGFRCAARGTKCLRREAPRWDAPLRDPALRQLLGGGGSDKTHTCPPCPAPEAAGGPSVFLFPPKPKDTLMISRTPEVTCVVVDVSHEDPEVKFNWYVDGVEVHNAKTKPREEQYNSTYRVVSVLTVLHQDWLNGKEYKCKVSNKALGAPIEKTISKAKGQPREPQVYTLPPSRDELTKNQVSLSCAVKGFYPSDIAVEWESNGQPENNYKTTPPVLDSDGSFFLVSKLTVDKSRWQQGNVFSCSVMHEALHNHYTQKSLSLSPGK

SEQ ID NO: 231 - protein, 813 aa, Artificial Sequence
  source: /note="Description of Artificial Sequence: Synthetic polypeptide"
TRCPDGQFCPVACCLDPGGASYSCCRPLLDKWPTTLSRHLGGPCQVDAHCSAGHSCIFTVSGTSSCCPFPEAVACGDGHHCCPRGFHCSADGRSCFQRSGNNSVGAIQCPDSQFECPDFSTCCVMVDGSWGCCPMPQASCCEDRVHCCPHGAFCDLVHTRCITPTGTHPLAKKLPAQRTNRAVALSSSVMCPDARSRCPDGSTCCELPSGKYGCCPMPNATCCSDHLHCCPQDTVCDLIQSKCLSKENATTDLLTKLPAHTVGDVKCDMEVSCPDGYTCCRLQSGAWGCCPFTQAVCCEDHIHCCPAGFTCDTQKGTCEQGPHQVPWMEKAPAHLSLPDPQALKRDVPCDNVSSCPSSDTCCQLTSGEWGCCPIPEAVCCSDHQHCCPQGYTCVAEGQCQRGSEIVAGLEKMPARRASLSHPRDIGCDQHTSCPVGQTCCPSLGGSWACCQLPHAVCCEDRQHCCPAGYTCNVKARSCEKEVVSAQPATFLARSPHVGVKDVECGEGHFCHDNQTCCRDNRQGWACCPYRQGVCCADRRHCCPAGFRCAARGTKCLRREAPRWDAPLRDPALRQLLGGGGSGGGGSDKTHTCPPCPAPELLGGPSVFLFPPKPKDTLMISRTPEVTCVVVDVSHEDPEVKFNWYVDGVEVHNAKTKPREEQYNSTYRVVSVLTVLHQDWLNGKEYKCKVSNKALPAPIEKTISKAKGQPREPQVYTLPPSRDELTKNQVSLSCAVKGFYPSDIAVEWESNGQPENNYKTTPPVLDSDGSFFLVSKLTVDKSRWQQGNVFSCSVLHEALHSHYTQKSLSLSPGK

SEQ ID NO: 232 - protein, 808 aa, Artificial Sequence
  source: /note="Description of Artificial Sequence: Synthetic polypeptide"
TRCPDGQFCPVACCLDPGGASYSCCRPLLDKWPTTLSRHLGGPCQVDAHCSAGHSCIFTVSGTSSCCPFPEAVACGDGHHCCPRGFHCSADGRSCFQRSGNNSVGAIQCPDSQFECPDFSTCCVMVDGSWGCCPMPQASCCEDRVHCCPHGAFCDLVHTRCITPTGTHPLAKKLPAQRTNRAVALSSSVMCPDARSRCPDGSTCCELPSGKYGCCPMPNATCCSDHLHCCPQDTVCDLIQSKCLSKENATTDLLTKLPAHTVGDVKCDMEVSCPDGYTCCRLQSGAWGCCPFTQAVCCEDHIHCCPAGFTCDTQKGTCEQGPHQVPWMEKAPAHLSLPDPQALKRDVPCDNVSSCPSSDTCCQLTSGEWGCCPIPEAVCCSDHQHCCPQGYTCVAEGQCQRGSEIVAGLEKMPARRASLSHPRDIGCDQHTSCPVGQTCCPSLGGSWACCQLPHAVCCEDRQHCCPAGYTCNVKARSCEKEVVSAQPATFLARSPHVGVKDVECGEGHFCHDNQTCCRDNRQGWACCPYRQGVCCADRRHCCPAGFRCAARGTKCLRREAPRWDAPLRDPALRQLLGGGGSDKTHTCPPCPAPELLGGPSVFLFPPKPKDTLMISRTPEVTCVVVDVSHEDPEVKFNWYVDGVEVHNAKTKPREEQYNSTYRVVSVLTVLHQDWLNGKEYKCKVSNKALPAPIEKTISKAKGQPREPQVYTLPPSRDELTKNQVSLSCAVKGFYPSDIAVEWESNGQPENNYKTTPPVLDSDGSFFLVSKLTVDKSRWQQGNVFSCSVLHEALHSHYTQKSLSLSPGK

SEQ ID NO: 233 - protein, 813 aa, Artificial Sequence
  source: /note="Description of Artificial Sequence: Synthetic polypeptide"
TRCPDGQFCPVACCLDPGGASYSCCRPLLDKWPTTLSRHLGGPCQVDAHCSAGHSCIFTVSGTSSCCPFPEAVACGDGHHCCPRGFHCSADGRSCFQRSGNNSVGAIQCPDSQFECPDFSTCCVMVDGSWGCCPMPQASCCEDRVHCCPHGAFCDLVHTRCITPTGTHPLAKKLPAQRTNRAVALSSSVMCPDARSRCPDGSTCCELPSGKYGCCPMPNATCCSDHLHCCPQDTVCDLIQSKCLSKENATTDLLTKLPAHTVGDVKCDMEVSCPDGYTCCRLQSGAWGCCPFTQAVCCEDHIHCCPAGFTCDTQKGTCEQGPHQVPWMEKAPAHLSLPDPQALKRDVPCDNVSSCPSSDTCCQLTSGEWGCCPIPEAVCCSDHQHCCPQGYTCVAEGQCQRGSEIVAGLEKMPARRASLSHPRDIGCDQHTSCPVGQTCCPSLGGSWACCQLPHAVCCEDRQHCCPAGYTCNVKARSCEKEVVSAQPATFLARSPHVGVKDVECGEGHFCHDNQTCCRDNRQGWACCPYRQGVCCADRRHCCPAGFRCAARGTKCLRREAPRWDAPLRDPALRQLLGGGGSGGGGSDKTHTCPPCPAPEAAGGPSVFLFPPKPKDTLMISRTPEVTCVVVDVSHEDPEVKFNWYVDGVEVHNAKTKPREEQYNSTYRVVSVLTVLHQDWLNGKEYKCKVSNKALPAPIEKTISKAKGQPREPQVYTLPPSRDELTKNQVSLSCAVKGFYPSDIAVEWESNGQPENNYKTTPPVLDSDGSFFLVSKLTVDKSRWQQGNVFSCSVLHEALHSHYTQKSLSLSPGK

SEQ ID NO: 234 - protein, 808 aa, Artificial Sequence
  source: /note="Description of Artificial Sequence: Synthetic polypeptide"
TRCPDGQFCPVACCLDPGGASYSCCRPLLDKWPTTLSRHLGGPCQVDAHCSAGHSCIFTVSGTSSCCPFPEAVACGDGHHCCPRGFHCSADGRSCFQRSGNNSVGAIQCPDSQFECPDFSTCCVMVDGSWGCCPMPQASCCEDRVHCCPHGAFCDLVHTRCITPTGTHPLAKKLPAQRTNRAVALSSSVMCPDARSRCPDGSTCCELPSGKYGCCPMPNATCCSDHLHCCPQDTVCDLIQSKCLSKENATTDLLTKLPAHTVGDVKCDMEVSCPDGYTCCRLQSGAWGCCPFTQAVCCEDHIHCCPAGFTCDTQKGTCEQGPHQVPWMEKAPAHLSLPDPQALKRDVPCDNVSSCPSSDTCCQLTSGEWGCCPIPEAVCCSDHQHCCPQGYTCVAEGQCQRGSEIVAGLEKMPARRASLSHPRDIGCDQHTSCPVGQTCCPSLGGSWACCQLPHAVCCEDRQHCCPAGYTCNVKARSCEKEVVSAQPATFLARSPHVGVKDVECGEGHFCHDNQTCCRDNRQGWACCPYRQGVCCADRRHCCPAGFRCAARGTKCLRREAPRWDAPLRDPALRQLLGGGGSDKTHTCPPCPAPEAAGGPSVFLFPPKPKDTLMISRTPEVTCVVVDVSHEDPEVKFNWYVDGVEVHNAKTKPREEQYNSTYRVVSVLTVLHQDWLNGKEYKCKVSNKALPAPIEKTISKAKGQPREPQVYTLPPSRDELTKNQVSLSCAVKGFYPSDIAVEWESNGQPENNYKTTPPVLDSDGSFFLVSKLTVDKSRWQQGNVFSCSVLHEALHSHYTQKSLSLSPGK

SEQ ID NO: 235 - protein, 813 aa, Artificial Sequence
  source: /note="Description of Artificial Sequence: Synthetic polypeptide"
TRCPDGQFCPVACCLDPGGASYSCCRPLLDKWPTTLSRHLGGPCQVDAHCSAGHSCIFTVSGTSSCCPFPEAVACGDGHHCCPRGFHCSADGRSCFQRSGNNSVGAIQCPDSQFECPDFSTCCVMVDGSWGCCPMPQASCCEDRVHCCPHGAFCDLVHTRCITPTGTHPLAKKLPAQRTNRAVALSSSVMCPDARSRCPDGSTCCELPSGKYGCCPMPNATCCSDHLHCCPQDTVCDLIQSKCLSKENATTDLLTKLPAHTVGDVKCDMEVSCPDGYTCCRLQSGAWGCCPFTQAVCCEDHIHCCPAGFTCDTQKGTCEQGPHQVPWMEKAPAHLSLPDPQALKRDVPCDNVSSCPSSDTCCQLTSGEWGCCPIPEAVCCSDHQHCCPQGYTCVAEGQCQRGSEIVAGLEKMPARRASLSHPRDIGCDQHTSCPVGQTCCPSLGGSWACCQLPHAVCCEDRQHCCPAGYTCNVKARSCEKEVVSAQPATFLARSPHVGVKDVECGEGHFCHDNQTCCRDNRQGWACCPYRQGVCCADRRHCCPAGFRCAARGTKCLRREAPRWDAPLRDPALRQLLGGGGSGGGGSDKTHTCPPCPAPEAAGGPSVFLFPPKPKDTLMISRTPEVTCVVVDVSHEDPEVKFNWYVDGVEVHNAKTKPREEQYNSTYRVVSVLTVLHQDWLNGKEYKCKVSNKALGAPIEKTISKAKGQPREPQVYTLPPSRDELTKNQVSLSCAVKGFYPSDIAVEWESNGQPENNYKTTPPVLDSDGSFFLVSKLTVDKSRWQQGNVFSCSVLHEALHSHYTQKSLSLSPGK

SEQ ID NO: 236 - protein, 808 aa, Artificial Sequence
  source: /note="Description of Artificial Sequence: Synthetic polypeptide"
TRCPDGQFCPVACCLDPGGASYSCCRPLLDKWPTTLSRHLGGPCQVDAHCSAGHSCIFTVSGTSSCCPFPEAVACGDGHHCCPRGFHCSADGRSCFQRSGNNSVGAIQCPDSQFECPDFSTCCVMVDGSWGCCPMPQASCCEDRVHCCPHGAFCDLVHTRCITPTGTHPLAKKLPAQRTNRAVALSSSVMCPDARSRCPDGSTCCELPSGKYGCCPMPNATCCSDHLHCCPQDTVCDLIQSKCLSKENATTDLLTKLPAHTVGDVKCDMEVSCPDGYTCCRLQSGAWGCCPFTQAVCCEDHIHCCPAGFTCDTQKGTCEQGPHQVPWMEKAPAHLSLPDPQALKRDVPCDNVSSCPSSDTCCQLTSGEWGCCPIPEAVCCSDHQHCCPQGYTCVAEGQCQRGSEIVAGLEKMPARRASLSHPRDIGCDQHTSCPVGQTCCPSLGGSWACCQLPHAVCCEDRQHCCPAGYTCNVKARSCEKEVVSAQPATFLARSPHVGVKDVECGEGHFCHDNQTCCRDNRQGWACCPYRQGVCCADRRHCCPAGFRCAARGTKCLRREAPRWDAPLRDPALRQLLGGGGSDKTHTCPPCPAPEAAGGPSVFLFPPKPKDTLMISRTPEVTCVVVDVSHEDPEVKFNWYVDGVEVHNAKTKPREEQYNSTYRVVSVLTVLHQDWLNGKEYKCKVSNKALGAPIEKTISKAKGQPREPQVYTLPPSRDELTKNQVSLSCAVKGFYPSDIAVEWESNGQPENNYKTTPPVLDSDGSFFLVSKLTVDKSRWQQGNVFSCSVLHEALHSHYTQKSLSLSPGK

SEQ ID NO: 237 - protein, 813 aa, Artificial Sequence
  source: /note="Description of Artificial Sequence: Synthetic polypeptide"
DKTHTCPPCPAPELLGGPSVFLFPPKPKDTLMISRTPEVTCVVVDVSHEDPEVKFNWYVDGVEVHNAKTKPREEQYNSTYRVVSVLTVLHQDWLNGKEYKCKVSNKALPAPIEKTISKAKGQPREPQVYTLPPSRDELTKNQVSLWCLVKGFYPSDIAVEWESNGQPENNYKTTPPVLDSDGSFFLYSKLTVDKSRWQQGNVFSCSVMHEALHNHYTQKSLSLSPGKGGGGSGGGGSTRCPDGQFCPVACCLDPGGASYSCCRPLLDKWPTTLSRHLGGPCQVDAHCSAGHSCIFTVSGTSSCCPFPEAVACGDGHHCCPRGFHCSADGRSCFQRSGNNSVGAIQCPDSQFECPDFSTCCVMVDGSWGCCPMPQASCCEDRVHCCPHGAFCDLVHTRCITPTGTHPLAKKLPAQRTNRAVALSSSVMCPDARSRCPDGSTCCELPSGKYGCCPMPNATCCSDHLHCCPQDTVCDLIQSKCLSKENATTDLLTKLPAHTVGDVKCDMEVSCPDGYTCCRLQSGAWGCCPFTQAVCCEDHIHCCPAGFTCDTQKGTCEQGPHQVPWMEKAPAHLSLPDPQALKRDVPCDNVSSCPSSDTCCQLTSGEWGCCPIPEAVCCSDHQHCCPQGYTCVAEGQCQRGSEIVAGLEKMPARRASLSHPRDIGCDQHTSCPVGQTCCPSLGGSWACCQLPHAVCCEDRQHCCPAGYTCNVKARSCEKEVVSAQPATFLARSPHVGVKDVECGEGHFCHDNQTCCRDNRQGWACCPYRQGVCCADRRHCCPAGFRCAARGTKCLRREAPRWDAPLRDPALRQLL

SEQ ID NO: 238 - protein, 808 aa, Artificial Sequence
  source: /note="Description of Artificial Sequence: Synthetic polypeptide"
DKTHTCPPCPAPELLGGPSVFLFPPKPKDTLMISRTPEVTCVVVDVSHEDPEVKFNWYVDGVEVHNAKTKPREEQYNSTYRVVSVLTVLHQDWLNGKEYKCKVSNKALPAPIEKTISKAKGQPREPQVYTLPPSRDELTKNQVSLWCLVKGFYPSDIAVEWESNGQPENNYKTTPPVLDSDGSFFLYSKLTVDKSRWQQGNVFSCSVMHEALHNHYTQKSLSLSPGKGGGGSTRCPDGQFCPVACCLDPGGASYSCCRPLLDKWPTTLSRHLGGPCQVDAHCSAGHSCIFTVSGTSSCCPFPEAVACGDGHHCCPRGFHCSADGRSCFQRSGNNSVGAIQCPDSQFECPDFSTCCVMVDGSWGCCPMPQASCCEDRVHCCPHGAFCDLVHTRCITPTGTHPLAKKLPAQRTNRAVALSSSVMCPDARSRCPDGSTCCELPSGKYGCCPMPNATCCSDHLHCCPQDTVCDLIQSKCLSKENATTDLLTKLPAHTVGDVKCDMEVSCPDGYTCCRLQSGAWGCCPFTQAVCCEDHIHCCPAGFTCDTQKGTCEQGPHQVPWMEKAPAHLSLPDPQALKRDVPCDNVSSCPSSDTCCQLTSGEWGCCPIPEAVCCSDHQHCCPQGYTCVAEGQCQRGSEIVAGLEKMPARRASLSHPRDIGCDQHTSCPVGQTCCPSLGGSWACCQLPHAVCCEDRQHCCPAGYTCNVKARSCEKEVVSAQPATFLARSPHVGVKDVECGEGHFCHDNQTCCRDNRQGWACCPYRQGVCCADRRHCCPAGFRCAARGTKCLRREAPRWDAPLRDPALRQLL

SEQ ID NO: 239 - protein, 813 aa, Artificial Sequence
  source: /note="Description of Artificial Sequence: Synthetic polypeptide"
DKTHTCPPCPAPEAAGGPSVFLFPPKPKDTLMISRTPEVTCVVVDVSHEDPEVKFNWYVDGVEVHNAKTKPREEQYNSTYRVVSVLTVLHQDWLNGKEYKCKVSNKALPAPIEKTISKAKGQPREPQVYTLPPSRDELTKNQVSLWCLVKGFYPSDIAVEWESNGQPENNYKTTPPVLDSDGSFFLYSKLTVDKSRWQQGNVFSCSVMHEALHNHYTQKSLSLSPGKGGGGSGGGGSTRCPDGQFCPVACCLDPGGASYSCCRPLLDKWPTTLSRHLGGPCQVDAHCSAGHSCIFTVSGTSSCCPFPEAVACGDGHHCCPRGFHCSADGRSCFQRSGNNSVGAIQCPDSQFECPDFSTCCVMVDGSWGCCPMPQASCCEDRVHCCPHGAFCDLVHTRCITPTGTHPLAKKLPAQRTNRAVALSSSVMCPDARSRCPDGSTCCELPSGKYGCCPMPNATCCSDHLHCCPQDTVCDLIQSKCLSKENATTDLLTKLPAHTVGDVKCDMEVSCPDGYTCCRLQSGAWGCCPFTQAVCCEDHIHCCPAGFTCDTQKGTCEQGPHQVPWMEKAPAHLSLPDPQALKRDVPCDNVSSCPSSDTCCQLTSGEWGCCPIPEAVCCSDHQHCCPQGYTCVAEGQCQRGSEIVAGLEKMPARRASLSHPRDIGCDQHTSCPVGQTCCPSLGGSWACCQLPHAVCCEDRQHCCPAGYTCNVKARSCEKEVVSAQPATFLARSPHVGVKDVECGEGHFCHDNQTCCRDNRQGWACCPYRQGVCCADRRHCCPAGFRCAARGTKCLRREAPRWDAPLRDPALRQLL

SEQ ID NO: 240 - protein, 808 aa, Artificial Sequence
  source: /note="Description of Artificial Sequence: Synthetic polypeptide"
DKTHTCPPCPAPEAAGGPSVFLFPPKPKDTLMISRTPEVTCVVVDVSHEDPEVKFNWYVDGVEVHNAKTKPREEQYNSTYRVVSVLTVLHQDWLNGKEYKCKVSNKALPAPIEKTISKAKGQPREPQVYTLPPSRDELTKNQVSLWCLVKGFYPSDIAVEWESNGQPENNYKTTPPVLDSDGSFFLYSKLTVDKSRWQQGNVFSCSVMHEALHNHYTQKSLSLSPGKGGGGSTRCPDGQFCPVACCLDPGGASYSCCRPLLDKWPTTLSRHLGGPCQVDAHCSAGHSCIFTVSGTSSCCPFPEAVACGDGHHCCPRGFHCSADGRSCFQRSGNNSVGAIQCPDSQFECPDFSTCCVMVDGSWGCCPMPQASCCEDRVHCCPHGAFCDLVHTRCITPTGTHPLAKKLPAQRTNRAVALSSSVMCPDARSRCPDGSTCCELPSGKYGCCPMPNATCCSDHLHCCPQDTVCDLIQSKCLSKENATTDLLTKLPAHTVGDVKCDMEVSCPDGYTCCRLQSGAWGCCPFTQAVCCEDHIHCCPAGFTCDTQKGTCEQGPHQVPWMEKAPAHLSLPDPQALKRDVPCDNVSSCPSSDTCCQLTSGEWGCCPIPEAVCCSDHQHCCPQGYTCVAEGQCQRGSEIVAGLEKMPARRASLSHPRDIGCDQHTSCPVGQTCCPSLGGSWACCQLPHAVCCEDRQHCCPAGYTCNVKARSCEKEVVSAQPATFLARSPHVGVKDVECGEGHFCHDNQTCCRDNRQGWACCPYRQGVCCADRRHCCPAGFRCAARGTKCLRREAPRWDAPLRDPALRQLL

SEQ ID NO: 241 - protein, 813 aa, Artificial Sequence
  source: /note="Description of Artificial Sequence: Synthetic polypeptide"
DKTHTCPPCPAPEAAGGPSVFLFPPKPKDTLMISRTPEVTCVVVDVSHEDPEVKFNWYVDGVEVHNAKTKPREEQYNSTYRVVSVLTVLHQDWLNGKEYKCKVSNKALGAPIEKTISKAKGQPREPQVYTLPPSRDELTKNQVSLWCLVKGFYPSDIAVEWESNGQPENNYKTTPPVLDSDGSFFLYSKLTVDKSRWQQGNVFSCSVMHEALHNHYTQKSLSLSPGKGGGGSGGGGSTRCPDGQFCPVACCLDPGGASYSCCRPLLDKWPTTLSRHLGGPCQVDAHCSAGHSCIFTVSGTSSCCPFPEAVACGDGHHCCPRGFHCSADGRSCFQRSGNNSVGAIQCPDSQFECPDFSTCCVMVDGSWGCCPMPQASCCEDRVHCCPHGAFCDLVHTRCITPTGTHPLAKKLPAQRTNRAVALSSSVMCPDARSRCPDGSTCCELPSGKYGCCPMPNATCCSDHLHCCPQDTVCDLIQSKCLSKENATTDLLTKLPAHTVGDVKCDMEVSCPDGYTCCRLQSGAWGCCPFTQAVCCEDHIHCCPAGFTCDTQKGTCEQGPHQVPWMEKAPAHLSLPDPQALKRDVPCDNVSSCPSSDTCCQLTSGEWGCCPIPEAVCCSDHQHCCPQGYTCVAEGQCQRGSEIVAGLEKMPARRASLSHPRDIGCDQHTSCPVGQTCCPSLGGSWACCQLPHAVCCEDRQHCCPAGYTCNVKARSCEKEVVSAQPATFLARSPHVGVKDVECGEGHFCHDNQTCCRDNRQGWACCPYRQGVCCADRRHCCPAGFRCAARGTKCLRREAPRWDAPLRDPALRQLL

SEQ ID NO: 242 - protein, 808 aa, Artificial Sequence
  source: /note="Description of Artificial Sequence: Synthetic polypeptide"
DKTHTCPPCPAPEAAGGPSVFLFPPKPKDTLMISRTPEVTCVVVDVSHEDPEVKFNWYVDGVEVHNAKTKPREEQYNSTYRVVSVLTVLHQDWLNGKEYKCKVSNKALGAPIEKTISKAKGQPREPQVYTLPPSRDELTKNQVSLWCLVKGFYPSDIAVEWESNGQPENNYKTTPPVLDSDGSFFLYSKLTVDKSRWQQGNVFSCSVMHEALHNHYTQKSLSLSPGKGGGGSTRCPDGQFCPVACCLDPGGASYSCCRPLLDKWPTTLSRHLGGPCQVDAHCSAGHSCIFTVSGTSSCCPFPEAVACGDGHHCCPRGFHCSADGRSCFQRSGNNSVGAIQCPDSQFECPDFSTCCVMVDGSWGCCPMPQASCCEDRVHCCPHGAFCDLVHTRCITPTGTHPLAKKLPAQRTNRAVALSSSVMCPDARSRCPDGSTCCELPSGKYGCCPMPNATCCSDHLHCCPQDTVCDLIQSKCLSKENATTDLLTKLPAHTVGDVKCDMEVSCPDGYTCCRLQSGAWGCCPFTQAVCCEDHIHCCPAGFTCDTQKGTCEQGPHQVPWMEKAPAHLSLPDPQALKRDVPCDNVSSCPSSDTCCQLTSGEWGCCPIPEAVCCSDHQHCCPQGYTCVAEGQCQRGSEIVAGLEKMPARRASLSHPRDIGCDQHTSCPVGQTCCPSLGGSWACCQLPHAVCCEDRQHCCPAGYTCNVKARSCEKEVVSAQPATFLARSPHVGVKDVECGEGHFCHDNQTCCRDNRQGWACCPYRQGVCCADRRHCCPAGFRCAARGTKCLRREAPRWDAPLRDPALRQLL

SEQ ID NO: 243 - protein, 813 aa, Artificial Sequence
  source: /note="Description of Artificial Sequence: Synthetic polypeptide"
DKTHTCPPCPAPELLGGPSVFLFPPKPKDTLMISRTPEVTCVVVDVSHEDPEVKFNWYVDGVEVHNAKTKPREEQYNSTYRVVSVLTVLHQDWLNGKEYKCKVSNKALPAPIEKTISKAKGQPREPQVYTLPPSRDELTKNQVSLWCLVKGFYPSDIAVEWESNGQPENNYKTTPPVLDSDGSFFLYSKLTVDKSRWQQGNVFSCSVLHEALHSHYTQKSLSLSPGKGGGGSGGGGSTRCPDGQFCPVACCLDPGGASYSCCRPLLDKWPTTLSRHLGGPCQVDAHCSAGHSCIFTVSGTSSCCPFPEAVACGDGHHCCPRGFHCSADGRSCFQRSGNNSVGAIQCPDSQFECPDFSTCCVMVDGSWGCCPMPQASCCEDRVHCCPHGAFCDLVHTRCITPTGTHPLAKKLPAQRTNRAVALSSSVMCPDARSRCPDGSTCCELPSGKYGCCPMPNATCCSDHLHCCPQDTVCDLIQSKCLSKENATTDLLTKLPAHTVGDVKCDMEVSCPDGYTCCRLQSGAWGCCPFTQAVCCEDHIHCCPAGFTCDTQKGTCEQGPHQVPWMEKAPAHLSLPDPQALKRDVPCDNVSSCPSSDTCCQLTSGEWGCCPIPEAVCCSDHQHCCPQGYTCVAEGQCQRGSEIVAGLEKMPARRASLSHPRDIGCDQHTSCPVGQTCCPSLGGSWACCQLPHAVCCEDRQHCCPAGYTCNVKARSCEKEVVSAQPATFLARSPHVGVKDVECGEGHFCHDNQTCCRDNRQGWACCPYRQGVCCADRRHCCPAGFRCAARGTKCLRREAPRWDAPLRDPALRQLL

SEQ ID NO: 244 - protein, 808 aa, Artificial Sequence
  source: /note="Description of Artificial Sequence: Synthetic polypeptide"
DKTHTCPPCPAPELLGGPSVFLFPPKPKDTLMISRTPEVTCVVVDVSHEDPEVKFNWYVDGVEVHNAKTKPREEQYNSTYRVVSVLTVLHQDWLNGKEYKCKVSNKALPAPIEKTISKAKGQPREPQVYTLPPSRDELTKNQVSLWCLVKGFYPSDIAVEWESNGQPENNYKTTPPVLDSDGSFFLYSKLTVDKSRWQQGNVFSCSVLHEALHSHYTQKSLSLSPGKGGGGSTRCPDGQFCPVACCLDPGGASYSCCRPLLDKWPTTLSRHLGGPCQVDAHCSAGHSCIFTVSGTSSCCPFPEAVACGDGHHCCPRGFHCSADGRSCFQRSGNNSVGAIQCPDSQFECPDFSTCCVMVDGSWGCCPMPQASCCEDRVHCCPHGAFCDLVHTRCITPTGTHPLAKKLPAQRTNRAVALSSSVMCPDARSRCPDGSTCCELPSGKYGCCPMPNATCCSDHLHCCPQDTVCDLIQSKCLSKENATTDLLTKLPAHTVGDVKCDMEVSCPDGYTCCRLQSGAWGCCPFTQAVCCEDHIHCCPAGFTCDTQKGTCEQGPHQVPWMEKAPAHLSLPDPQALKRDVPCDNVSSCPSSDTCCQLTSGEWGCCPIPEAVCCSDHQHCCPQGYTCVAEGQCQRGSEIVAGLEKMPARRASLSHPRDIGCDQHTSCPVGQTCCPSLGGSWACCQLPHAVCCEDRQHCCPAGYTCNVKARSCEKEVVSAQPATFLARSPHVGVKDVECGEGHFCHDNQTCCRDNRQGWACCPYRQGVCCADRRHCCPAGFRCAARGTKCLRREAPRWDAPLRDPALRQLL

SEQ ID NO: 245 - protein, 813 aa, Artificial Sequence
  source: /note="Description of Artificial Sequence: Synthetic polypeptide"
DKTHTCPPCPAPEAAGGPSVFLFPPKPKDTLMISRTPEVTCVVVDVSHEDPEVKFNWYVDGVEVHNAKTKPREEQYNSTYRVVSVLTVLHQDWLNGKEYKCKVSNKALPAPIEKTISKAKGQPREPQVYTLPPSRDELTKNQVSLWCLVKGFYPSDIAVEWESNGQPENNYKTTPPVLDSDGSFFLYSKLTVDKSRWQQGNVFSCSVLHEALHSHYTQKSLSLSPGKGGGGSGGGGSTRCPDGQFCPVACCLDPGGASYSCCRPLLDKWPTTLSRHLGGPCQVDAHCSAGHSCIFTVSGTSSCCPFPEAVACGDGHHCCPRGFHCSADGRSCFQRSGNNSVGAIQCPDSQFECPDFSTCCVMVDGSWGCCPMPQASCCEDRVHCCPHGAFCDLVHTRCITPTGTHPLAKKLPAQRTNRAVALSSSVMCPDARSRCPDGSTCCELPSGKYGCCPMPNATCCSDHLHCCPQDTVCDLIQSKCLSKENATTDLLTKLPAHTVGDVKCDMEVSCPDGYTCCRLQSGAWGCCPFTQAVCCEDHIHCCPAGFTCDTQKGTCEQGPHQVPWMEKAPAHLSLPDPQALKRDVPCDNVSSCPSSDTCCQLTSGEWGCCPIPEAVCCSDHQHCCPQGYTCVAEGQCQRGSEIVAGLEKMPARRASLSHPRDIGCDQHTSCPVGQTCCPSLGGSWACCQLPHAVCCEDRQHCCPAGYTCNVKARSCEKEVVSAQPATFLARSPHVGVKDVECGEGHFCHDNQTCCRDNRQGWACCPYRQGVCCADRRHCCPAGFRCAARGTKCLRREAPRWDAPLRDPALRQLL

SEQ ID NO: 246 - protein, 808 aa, Artificial Sequence
  source: /note="Description of Artificial Sequence: Synthetic polypeptide"
DKTHTCPPCPAPEAAGGPSVFLFPPKPKDTLMISRTPEVTCVVVDVSHEDPEVKFNWYVDGVEVHNAKTKPREEQYNSTYRVVSVLTVLHQDWLNGKEYKCKVSNKALPAPIEKTISKAKGQPREPQVYTLPPSRDELTKNQVSLWCLVKGFYPSDIAVEWESNGQPENNYKTTPPVLDSDGSFFLYSKLTVDKSRWQQGNVFSCSVLHEALHSHYTQKSLSLSPGKGGGGSTRCPDGQFCPVACCLDPGGASYSCCRPLLDKWPTTLSRHLGGPCQVDAHCSAGHSCIFTVSGTSSCCPFPEAVACGDGHHCCPRGFHCSADGRSCFQRSGNNSVGAIQCPDSQFECPDFSTCCVMVDGSWGCCPMPQASCCEDRVHCCPHGAFCDLVHTRCITPTGTHPLAKKLPAQRTNRAVALSSSVMCPDARSRCPDGSTCCELPSGKYGCCPMPNATCCSDHLHCCPQDTVCDLIQSKCLSKENATTDLLTKLPAHTVGDVKCDMEVSCPDGYTCCRLQSGAWGCCPFTQAVCCEDHIHCCPAGFTCDTQKGTCEQGPHQVPWMEKAPAHLSLPDPQALKRDVPCDNVSSCPSSDTCCQLTSGEWGCCPIPEAVCCSDHQHCCPQGYTCVAEGQCQRGSEIVAGLEKMPARRASLSHPRDIGCDQHTSCPVGQTCCPSLGGSWACCQLPHAVCCEDRQHCCPAGYTCNVKARSCEKEVVSAQPATFLARSPHVGVKDVECGEGHFCHDNQTCCRDNRQGWACCPYRQGVCCADRRHCCPAGFRCAARGTKCLRREAPRWDAPLRDPALRQLL

SEQ ID NO: 247 - protein, 813 aa, Artificial Sequence
  source: /note="Description of Artificial Sequence: Synthetic polypeptide"
DKTHTCPPCPAPEAAGGPSVFLFPPKPKDTLMISRTPEVTCVVVDVSHEDPEVKFNWYVDGVEVHNAKTKPREEQYNSTYRVVSVLTVLHQDWLNGKEYKCKVSNKALGAPIEKTISKAKGQPREPQVYTLPPSRDELTKNQVSLWCLVKGFYPSDIAVEWESNGQPENNYKTTPPVLDSDGSFFLYSKLTVDKSRWQQGNVFSCSVLHEALHSHYTQKSLSLSPGKGGGGSGGGGSTRCPDGQFCPVACCLDPGGASYSCCRPLLDKWPTTLSRHLGGPCQVDAHCSAGHSCIFTVSGTSSCCPFPEAVACGDGHHCCPRGFHCSADGRSCFQRSGNNSVGAIQCPDSQFECPDFSTCCVMVDGSWGCCPMPQASCCEDRVHCCPHGAFCDLVHTRCITPTGTHPLAKKLPAQRTNRAVALSSSVMCPDARSRCPDGSTCCELPSGKYGCCPMPNATCCSDHLHCCPQDTVCDLIQSKCLSKENATTDLLTKLPAHTVGDVKCDMEVSCPDGYTCCRLQSGAWGCCPFTQAVCCEDHIHCCPAGFTCDTQKGTCEQGPHQVPWMEKAPAHLSLPDPQALKRDVPCDNVSSCPSSDTCCQLTSGEWGCCPIPEAVCCSDHQHCCPQGYTCVAEGQCQRGSEIVAGLEKMPARRASLSHPRDIGCDQHTSCPVGQTCCPSLGGSWACCQLPHAVCCEDRQHCCPAGYTCNVKARSCEKEVVSAQPATFLARSPHVGVKDVECGEGHFCHDNQTCCRDNRQGWACCPYRQGVCCADRRHCCPAGFRCAARGTKCLRREAPRWDAPLRDPALRQLL

SEQ ID NO: 248 - protein, 808 aa, Artificial Sequence
  source: /note="Description of Artificial Sequence: Synthetic polypeptide"
DKTHTCPPCPAPEAAGGPSVFLFPPKPKDTLMISRTPEVTCVVVDVSHEDPEVKFNWYVDGVEVHNAKTKPREEQYNSTYRVVSVLTVLHQDWLNGKEYKCKVSNKALGAPIEKTISKAKGQPREPQVYTLPPSRDELTKNQVSLWCLVKGFYPSDIAVEWESNGQPENNYKTTPPVLDSDGSFFLYSKLTVDKSRWQQGNVFSCSVLHEALHSHYTQKSLSLSPGKGGGGSTRCPDGQFCPVACCLDPGGASYSCCRPLLDKWPTTLSRHLGGPCQVDAHCSAGHSCIFTVSGTSSCCPFPEAVACGDGHHCCPRGFHCSADGRSCFQRSGNNSVGAIQCPDSQFECPDFSTCCVMVDGSWGCCPMPQASCCEDRVHCCPHGAFCDLVHTRCITPTGTHPLAKKLPAQRTNRAVALSSSVMCPDARSRCPDGSTCCELPSGKYGCCPMPNATCCSDHLHCCPQDTVCDLIQSKCLSKENATTDLLTKLPAHTVGDVKCDMEVSCPDGYTCCRLQSGAWGCCPFTQAVCCEDHIHCCPAGFTCDTQKGTCEQGPHQVPWMEKAPAHLSLPDPQALKRDVPCDNVSSCPSSDTCCQLTSGEWGCCPIPEAVCCSDHQHCCPQGYTCVAEGQCQRGSEIVAGLEKMPARRASLSHPRDIGCDQHTSCPVGQTCCPSLGGSWACCQLPHAVCCEDRQHCCPAGYTCNVKARSCEKEVVSAQPATFLARSPHVGVKDVECGEGHFCHDNQTCCRDNRQGWACCPYRQGVCCADRRHCCPAGFRCAARGTKCLRREAPRWDAPLRDPALRQLL

SEQ ID NO: 249 - protein, 813 aa, Artificial Sequence
  source: /note="Description of Artificial Sequence: Synthetic polypeptide"
TRCPDGQFCPVACCLDPGGASYSCCRPLLDKWPTTLSRHLGGPCQVDAHCSAGHSCIFTVSGTSSCCPFPEAVACGDGHHCCPRGFHCSADGRSCFQRSGNNSVGAIQCPDSQFECPDFSTCCVMVDGSWGCCPMPQASCCEDRVHCCPHGAFCDLVHTRCITPTGTHPLAKKLPAQRTNRAVALSSSVMCPDARSRCPDGSTCCELPSGKYGCCPMPNATCCSDHLHCCPQDTVCDLIQSKCLSKENATTDLLTKLPAHTVGDVKCDMEVSCPDGYTCCRLQSGAWGCCPFTQAVCCEDHIHCCPAGFTCDTQKGTCEQGPHQVPWMEKAPAHLSLPDPQALKRDVPCDNVSSCPSSDTCCQLTSGEWGCCPIPEAVCCSDHQHCCPQGYTCVAEGQCQRGSEIVAGLEKMPARRASLSHPRDIGCDQHTSCPVGQTCCPSLGGSWACCQLPHAVCCEDRQHCCPAGYTCNVKARSCEKEVVSAQPATFLARSPHVGVKDVECGEGHFCHDNQTCCRDNRQGWACCPYRQGVCCADRRHCCPAGFRCAARGTKCLRREAPRWDAPLRDPALRQLLGGGGSGGGGSDKTHTCPPCPAPELLGGPSVFLFPPKPKDTLMISRTPEVTCVVVDVSHEDPEVKFNWYVDGVEVHNAKTKPREEQYNSTYRVVSVLTVLHQDWLNGKEYKCKVSNKALPAPIEKTISKAKGQPREPQVYTLPPSRDELTKNQVSLWCLVKGFYPSDIAVEWESNGQPENNYKTTPPVLDSDGSFFLYSKLTVDKSRWQQGNVFSCSVMHEALHNHYTQKSLSLSPGK

SEQ ID NO: 250 - protein, 808 aa, Artificial Sequence
  source: /note="Description of Artificial Sequence: Synthetic polypeptide"
TRCPDGQFCPVACCLDPGGASYSCCRPLLDKWPTTLSRHLGGPCQVDAHCSAGHSCIFTVSGTSSCCPFPEAVACGDGHHCCPRGFHCSADGRSCFQRSGNNSVGAIQCPDSQFECPDFSTCCVMVDGSWGCCPMPQASCCEDRVHCCPHGAFCDLVHTRCITPTGTHPLAKKLPAQRTNRAVALSSSVMCPDARSRCPDGSTCCELPSGKYGCCPMPNATCCSDHLHCCPQDTVCDLIQSKCLSKENATTDLLTKLPAHTVGDVKCDMEVSCPDGYTCCRLQSGAWGCCPFTQAVCCEDHIHCCPAGFTCDTQKGTCEQGPHQVPWMEKAPAHLSLPDPQALKRDVPCDNVSSCPSSDTCCQLTSGEWGCCPIPEAVCCSDHQHCCPQGYTCVAEGQCQRGSEIVAGLEKMPARRASLSHPRDIGCDQHTSCPVGQTCCPSLGGSWACCQLPHAVCCEDRQHCCPAGYTCNVKARSCEKEVVSAQPATFLARSPHVGVKDVECGEGHFCHDNQTCCRDNRQGWACCPYRQGVCCADRRHCCPAGFRCAARGTKCLRREAPRWDAPLRDPALRQLLGGGGSDKTHTCPPCPAPELLGGPSVFLFPPKPKDTLMISRTPEVTCVVVDVSHEDPEVKFNWYVDGVEVHNAKTKPREEQYNSTYRVVSVLTVLHQDWLNGKEYKCKVSNKALPAPIEKTISKAKGQPREPQVYTLPPSRDELTKNQVSLWCLVKGFYPSDIAVEWESNGQPENNYKTTPPVLDSDGSFFLYSKLTVDKSRWQQGNVFSCSVMHEALHNHYTQKSLSLSPGK

SEQ ID NO: 251 - protein, 813 aa, Artificial Sequence
  source: /note="Description of Artificial Sequence: Synthetic polypeptide"
TRCPDGQFCPVACCLDPGGASYSCCRPLLDKWPTTLSRHLGGPCQVDAHCSAGHSCIFTVSGTSSCCPFPEAVACGDGHHCCPRGFHCSADGRSCFQRSGNNSVGAIQCPDSQFECPDFSTCCVMVDGSWGCCPMPQASCCEDRVHCCPHGAFCDLVHTRCITPTGTHPLAKKLPAQRTNRAVALSSSVMCPDARSRCPDGSTCCELPSGKYGCCPMPNATCCSDHLHCCPQDTVCDLIQSKCLSKENATTDLLTKLPAHTVGDVKCDMEVSCPDGYTCCRLQSGAWGCCPFTQAVCCEDHIHCCPAGFTCDTQKGTCEQGPHQVPWMEKAPAHLSLPDPQALKRDVPCDNVSSCPSSDTCCQLTSGEWGCCPIPEAVCCSDHQHCCPQGYTCVAEGQCQRGSEIVAGLEKMPARRASLSHPRDIGCDQHTSCPVGQTCCPSLGGSWACCQLPHAVCCEDRQHCCPAGYTCNVKARSCEKEVVSAQPATFLARSPHVGVKDVECGEGHFCHDNQTCCRDNRQGWACCPYRQGVCCADRRHCCPAGFRCAARGTKCLRREAPRWDAPLRDPALRQLLGGGGSGGGGSDKTHTCPPCPAPEAAGGPSVFLFPPKPKDTLMISRTPEVTCVVVDVSHEDPEVKFNWYVDGVEVHNAKTKPREEQYNSTYRVVSVLTVLHQDWLNGKEYKCKVSNKALPAPIEKTISKAKGQPREPQVYTLPPSRDELTKNQVSLWCLVKGFYPSDIAVEWESNGQPENNYKTTPPVLDSDGSFFLYSKLTVDKSRWQQGNVFSCSVMHEALHNHYTQKSLSLSPGK

SEQ ID NO: 252 - protein, 808 aa, Artificial Sequence
  source: /note="Description of Artificial Sequence: Synthetic polypeptide"
TRCPDGQFCPVACCLDPGGASYSCCRPLLDKWPTTLSRHLGGPCQVDAHCSAGHSCIFTVSGTSSCCPFPEAVACGDGHHCCPRGFHCSADGRSCFQRSGNNSVGAIQCPDSQFECPDFSTCCVMVDGSWGCCPMPQASCCEDRVHCCPHGAFCDLVHTRCITPTGTHPLAKKLPAQRTNRAVALSSSVMCPDARSRCPDGSTCCELPSGKYGCCPMPNATCCSDHLHCCPQDTVCDLIQSKCLSKENATTDLLTKLPAHTVGDVKCDMEVSCPDGYTCCRLQSGAWGCCPFTQAVCCEDHIHCCPAGFTCDTQKGTCEQGPHQVPWMEKAPAHLSLPDPQALKRDVPCDNVSSCPSSDTCCQLTSGEWGCCPIPEAVCCSDHQHCCPQGYTCVAEGQCQRGSEIVAGLEKMPARRASLSHPRDIGCDQHTSCPVGQTCCPSLGGSWACCQLPHAVCCEDRQHCCPAGYTCNVKARSCEKEVVSAQPATFLARSPHVGVKDVECGEGHFCHDNQTCCRDNRQGWACCPYRQGVCCADRRHCCPAGFRCAARGTKCLRREAPRWDAPLRDPALRQLLGGGGSDKTHTCPPCPAPEAAGGPSVFLFPPKPKDTLMISRTPEVTCVVVDVSHEDPEVKFNWYVDGVEVHNAKTKPREEQYNSTYRVVSVLTVLHQDWLNGKEYKCKVSNKALPAPIEKTISKAKGQPREPQVYTLPPSRDELTKNQVSLWCLVKGFYPSDIAVEWESNGQPENNYKTTPPVLDSDGSFFLYSKLTVDKSRWQQGNVFSCSVMHEALHNHYTQKSLSLSPGK

SEQ ID NO: 253 - protein, 813 aa, Artificial Sequence
  source: /note="Description of Artificial Sequence: Synthetic polypeptide"
TRCPDGQFCPVACCLDPGGASYSCCRPLLDKWPTTLSRHLGGPCQVDAHCSAGHSCIFTVSGTSSCCPFPEAVACGDGHHCCPRGFHCSADGRSCFQRSGNNSVGAIQCPDSQFECPDFSTCCVMVDGSWGCCPMPQASCCEDRVHCCPHGAFCDLVHTRCITPTGTHPLAKKLPAQRTNRAVALSSSVMCPDARSRCPDGSTCCELPSGKYGCCPMPNATCCSDHLHCCPQDTVCDLIQSKCLSKENATTDLLTKLPAHTVGDVKCDMEVSCPDGYTCCRLQSGAWGCCPFTQAVCCEDHIHCCPAGFTCDTQKGTCEQGPHQVPWMEKAPAHLSLPDPQALKRDVPCDNVSSCPSSDTCCQLTSGEWGCCPIPEAVCCSDHQHCCPQGYTCVAEGQCQRGSEIVAGLEKMPARRASLSHPRDIGCDQHTSCPVGQTCCPSLGGSWACCQLPHAVCCEDRQHCCPAGYTCNVKARSCEKEVVSAQPATFLARSPHVGVKDVECGEGHFCHDNQTCCRDNRQGWACCPYRQGVCCADRRHCCPAGFRCAARGTKCLRREAPRWDAPLRDPALRQLLGGGGSGGGGSDKTHTCPPCPAPEAAGGPSVFLFPPKPKDTLMISRTPEVTCVVVDVSHEDPEVKFNWYVDGVEVHNAKTKPREEQYNSTYRVVSVLTVLHQDWLNGKEYKCKVSNKALGAPIEKTISKAKGQPREPQVYTLPPSRDELTKNQVSLWCLVKGFYPSDIAVEWESNGQPENNYKTTPPVLDSDGSFFLYSKLTVDKSRWQQGNVFSCSVMHEALHNHYTQKSLSLSPGK

SEQ ID NO: 254 - protein, 808 aa, Artificial Sequence
  source: /note="Description of Artificial Sequence: Synthetic polypeptide"
TRCPDGQFCPVACCLDPGGASYSCCRPLLDKWPTTLSRHLGGPCQVDAHCSAGHSCIFTVSGTSSCCPFPEAVACGDGHHCCPRGFHCSADGRSCFQRSGNNSVGAIQCPDSQFECPDFSTCCVMVDGSWGCCPMPQASCCEDRVHCCPHGAFCDLVHTRCITPTGTHPLAKKLPAQRTNRAVALSSSVMCPDARSRCPDGSTCCELPSGKYGCCPMPNATCCSDHLHCCPQDTVCDLIQSKCLSKENATTDLLTKLPAHTVGDVKCDMEVSCPDGYTCCRLQSGAWGCCPFTQAVCCEDHIHCCPAGFTCDTQKGTCEQGPHQVPWMEKAPAHLSLPDPQALKRDVPCDNVSSCPSSDTCCQLTSGEWGCCPIPEAVCCSDHQHCCPQGYTCVAEGQCQRGSEIVAGLEKMPARRASLSHPRDIGCDQHTSCPVGQTCCPSLGGSWACCQLPHAVCCEDRQHCCPAGYTCNVKARSCEKEVVSAQPATFLARSPHVGVKDVECGEGHFCHDNQTCCRDNRQGWACCPYRQGVCCADRRHCCPAGFRCAARGTKCLRREAPRWDAPLRDPALRQLLGGGGSDKTHTCPPCPAPEAAGGPSVFLFPPKPKDTLMISRTPEVTCVVVDVSHEDPEVKFNWYVDGVEVHNAKTKPREEQYNSTYRVVSVLTVLHQDWLNGKEYKCKVSNKALGAPIEKTISKAKGQPREPQVYTLPPSRDELTKNQVSLWCLVKGFYPSDIAVEWESNGQPENNYKTTPPVLDSDGSFFLYSKLTVDKSRWQQGNVFSCSVMHEALHNHYTQKSLSLSPGK

SEQ ID NO: 255 - protein, 813 aa, Artificial Sequence
  source: /note="Description of Artificial Sequence: Synthetic polypeptide"
TRCPDGQFCPVACCLDPGGASYSCCRPLLDKWPTTLSRHLGGPCQVDAHCSAGHSCIFTVSGTSSCCPFPEAVACGDGHHCCPRGFHCSADGRSCFQRSGNNSVGAIQCPDSQFECPDFSTCCVMVDGSWGCCPMPQASCCEDRVHCCPHGAFCDLVHTRCITPTGTHPLAKKLPAQRTNRAVALSSSVMCPDARSRCPDGSTCCELPSGKYGCCPMPNATCCSDHLHCCPQDTVCDLIQSKCLSKENATTDLLTKLPAHTVGDVKCDMEVSCPDGYTCCRLQSGAWGCCPFTQAVCCEDHIHCCPAGFTCDTQKGTCEQGPHQVPWMEKAPAHLSLPDPQALKRDVPCDNVSSCPSSDTCCQLTSGEWGCCPIPEAVCCSDHQHCCPQGYTCVAEGQCQRGSEIVAGLEKMPARRASLSHPRDIGCDQHTSCPVGQTCCPSLGGSWACCQLPHAVCCEDRQHCCPAGYTCNVKARSCEKEVVSAQPATFLARSPHVGVKDVECGEGHFCHDNQTCCRDNRQGWACCPYRQGVCCADRRHCCPAGFRCAARGTKCLRREAPRWDAPLRDPALRQLLGGGGSGGGGSDKTHTCPPCPAPELLGGPSVFLFPPKPKDTLMISRTPEVTCVVVDVSHEDPEVKFNWYVDGVEVHNAKTKPREEQYNSTYRVVSVLTVLHQDWLNGKEYKCKVSNKALPAPIEKTISKAKGQPREPQVYTLPPSRDELTKNQVSLWCLVKGFYPSDIAVEWESNGQPENNYKTTPPVLDSDGSFFLYSKLTVDKSRWQQGNVFSCSVLHEALHSHYTQKSLSLSPGK

SEQ ID NO: 256 - protein, 808 aa, Artificial Sequence
  source: /note="Description of Artificial Sequence: Synthetic polypeptide"
TRCPDGQFCPVACCLDPGGASYSCCRPLLDKWPTTLSRHLGGPCQVDAHCSAGHSCIFTVSGTSSCCPFPEAVACGDGHHCCPRGFHCSADGRSCFQRSGNNSVGAIQCPDSQFECPDFSTCCVMVDGSWGCCPMPQASCCEDRVHCCPHGAFCDLVHTRCITPTGTHPLAKKLPAQRTNRAVALSSSVMCPDARSRCPDGSTCCELPSGKYGCCPMPNATCCSDHLHCCPQDTVCDLIQSKCLSKENATTDLLTKLPAHTVGDVKCDMEVSCPDGYTCCRLQSGAWGCCPFTQAVCCEDHIHCCPAGFTCDTQKGTCEQGPHQVPWMEKAPAHLSLPDPQALKRDVPCDNVSSCPSSDTCCQLTSGEWGCCPIPEAVCCSDHQHCCPQGYTCVAEGQCQRGSEIVAGLEKMPARRASLSHPRDIGCDQHTSCPVGQTCCPSLGGSWACCQLPHAVCCEDRQHCCPAGYTCNVKARSCEKEVVSAQPATFLARSPHVGVKDVECGEGHFCHDNQTCCRDNRQGWACCPYRQGVCCADRRHCCPAGFRCAARGTKCLRREAPRWDAPLRDPALRQLLGGGGSDKTHTCPPCPAPELLGGPSVFLFPPKPKDTLMISRTPEVTCVVVDVSHEDPEVKFNWYVDGVEVHNAKTKPREEQYNSTYRVVSVLTVLHQDWLNGKEYKCKVSNKALPAPIEKTISKAKGQPREPQVYTLPPSRDELTKNQVSLWCLVKGFYPSDIAVEWESNGQPENNYKTTPPVLDSDGSFFLYSKLTVDKSRWQQGNVFSCSVLHEALHSHYTQKSLSLSPGK

SEQ ID NO: 257 - protein, 813 aa, Artificial Sequence
  source: /note="Description of Artificial Sequence: Synthetic polypeptide"
TRCPDGQFCPVACCLDPGGASYSCCRPLLDKWPTTLSRHLGGPCQVDAHCSAGHSCIFTVSGTSSCCPFPEAVACGDGHHCCPRGFHCSADGRSCFQRSGNNSVGAIQCPDSQFECPDFSTCCVMVDGSWGCCPMPQASCCEDRVHCCPHGAFCDLVHTRCITPTGTHPLAKKLPAQRTNRAVALSSSVMCPDARSRCPDGSTCCELPSGKYGCCPMPNATCCSDHLHCCPQDTVCDLIQSKCLSKENATTDLLTKLPAHTVGDVKCDMEVSCPDGYTCCRLQSGAWGCCPFTQAVCCEDHIHCCPAGFTCDTQKGTCEQGPHQVPWMEKAPAHLSLPDPQALKRDVPCDNVSSCPSSDTCCQLTSGEWGCCPIPEAVCCSDHQHCCPQGYTCVAEGQCQRGSEIVAGLEKMPARRASLSHPRDIGCDQHTSCPVGQTCCPSLGGSWACCQLPHAVCCEDRQHCCPAGYTCNVKARSCEKEVVSAQPATFLARSPHVGVKDVECGEGHFCHDNQTCCRDNRQGWACCPYRQGVCCADRRHCCPAGFRCAARGTKCLRREAPRWDAPLRDPALRQLLGGGGSGGGGSDKTHTCPPCPAPEAAGGPSVFLFPPKPKDTLMISRTPEVTCVVVDVSHEDPEVKFNWYVDGVEVHNAKTKPREEQYNSTYRVVSVLTVLHQDWLNGKEYKCKVSNKALPAPIEKTISKAKGQPREPQVYTLPPSRDELTKNQVSLWCLVKGFYPSDIAVEWESNGQPENNYKTTPPVLDSDGSFFLYSKLTVDKSRWQQGNVFSCSVLHEALHSHYTQKSLSLSPGK

SEQ ID NO: 258 - protein, 808 aa, Artificial Sequence
  source: /note="Description of Artificial Sequence: Synthetic polypeptide"
TRCPDGQFCPVACCLDPGGASYSCCRPLLDKWPTTLSRHLGGPCQVDAHCSAGHSCIFTVSGTSSCCPFPEAVACGDGHHCCPRGFHCSADGRSCFQRSGNNSVGAIQCPDSQFECPDFSTCCVMVDGSWGCCPMPQASCCEDRVHCCPHGAFCDLVHTRCITPTGTHPLAKKLPAQRTNRAVALSSSVMCPDARSRCPDGSTCCELPSGKYGCCPMPNATCCSDHLHCCPQDTVCDLIQSKCLSKENATTDLLTKLPAHTVGDVKCDMEVSCPDGYTCCRLQSGAWGCCPFTQAVCCEDHIHCCPAGFTCDTQKGTCEQGPHQVPWMEKAPAHLSLPDPQALKRDVPCDNVSSCPSSDTCCQLTSGEWGCCPIPEAVCCSDHQHCCPQGYTCVAEGQCQRGSEIVAGLEKMPARRASLSHPRDIGCDQHTSCPVGQTCCPSLGGSWACCQLPHAVCCEDRQHCCPAGYTCNVKARSCEKEVVSAQPATFLARSPHVGVKDVECGEGHFCHDNQTCCRDNRQGWACCPYRQGVCCADRRHCCPAGFRCAARGTKCLRREAPRWDAPLRDPALRQLLGGGGSDKTHTCPPCPAPEAAGGPSVFLFPPKPKDTLMISRTPEVTCVVVDVSHEDPEVKFNWYVDGVEVHNAKTKPREEQYNSTYRVVSVLTVLHQDWLNGKEYKCKVSNKALPAPIEKTISKAKGQPREPQVYTLPPSRDELTKNQVSLWCLVKGFYPSDIAVEWESNGQPENNYKTTPPVLDSDGSFFLYSKLTVDKSRWQQGNVFSCSVLHEALHSHYTQKSLSLSPGK

SEQ ID NO: 259 - protein, 813 aa, Artificial Sequence
  source: /note="Description of Artificial Sequence: Synthetic polypeptide"
TRCPDGQFCPVACCLDPGGASYSCCRPLLDKWPTTLSRHLGGPCQVDAHCSAGHSCIFTVSGTSSCCPFPEAVACGDGHHCCPRGFHCSADGRSCFQRSGNNSVGAIQCPDSQFECPDFSTCCVMVDGSWGCCPMPQASCCEDRVHCCPHGAFCDLVHTRCITPTGTHPLAKKLPAQRTNRAVALSSSVMCPDARSRCPDGSTCCELPSGKYGCCPMPNATCCSDHLHCCPQDTVCDLIQSKCLSKENATTDLLTKLPAHTVGDVKCDMEVSCPDGYTCCRLQSGAWGCCPFTQAVCCEDHIHCCPAGFTCDTQKGTCEQGPHQVPWMEKAPAHLSLPDPQALKRDVPCDNVSSCPSSDTCCQLTSGEWGCCPIPEAVCCSDHQHCCPQGYTCVAEGQCQRGSEIVAGLEKMPARRASLSHPRDIGCDQHTSCPVGQTCCPSLGGSWACCQLPHAVCCEDRQHCCPAGYTCNVKARSCEKEVVSAQPATFLARSPHVGVKDVECGEGHFCHDNQTCCRDNRQGWACCPYRQGVCCADRRHCCPAGFRCAARGTKCLRREAPRWDAPLRDPALRQLLGGGGSGGGGSDKTHTCPPCPAPEAAGGPSVFLFPPKPKDTLMISRTPEVTCVVVDVSHEDPEVKFNWYVDGVEVHNAKTKPREEQYNSTYRVVSVLTVLHQDWLNGKEYKCKVSNKALGAPIEKTISKAKGQPREPQVYTLPPSRDELTKNQVSLWCLVKGFYPSDIAVEWESNGQPENNYKTTPPVLDSDGSFFLYSKLTVDKSRWQQGNVFSCSVLHEALHSHYTQKSLSLSPGK

SEQ ID NO: 260 - protein, 808 aa, Artificial Sequence
  source: /note="Description of Artificial Sequence: Synthetic polypeptide"
TRCPDGQFCPVACCLDPGGASYSCCRPLLDKWPTTLSRHLGGPCQVDAHCSAGHSCIFTVSGTSSCCPFPEAVACGDGHHCCPRGFHCSADGRSCFQRSGNNSVGAIQCPDSQFECPDFSTCCVMVDGSWGCCPMPQASCCEDRVHCCPHGAFCDLVHTRCITPTGTHPLAKKLPAQRTNRAVALSSSVMCPDARSRCPDGSTCCELPSGKYGCCPMPNATCCSDHLHCCPQDTVCDLIQSKCLSKENATTDLLTKLPAHTVGDVKCDMEVSCPDGYTCCRLQSGAWGCCPFTQAVCCEDHIHCCPAGFTCDTQKGTCEQGPHQVPWMEKAPAHLSLPDPQALKRDVPCDNVSSCPSSDTCCQLTSGEWGCCPIPEAVCCSDHQHCCPQGYTCVAEGQCQRGSEIVAGLEKMPARRASLSHPRDIGCDQHTSCPVGQTCCPSLGGSWACCQLPHAVCCEDRQHCCPAGYTCNVKARSCEKEVVSAQPATFLARSPHVGVKDVECGEGHFCHDNQTCCRDNRQGWACCPYRQGVCCADRRHCCPAGFRCAARGTKCLRREAPRWDAPLRDPALRQLLGGGGSDKTHTCPPCPAPEAAGGPSVFLFPPKPKDTLMISRTPEVTCVVVDVSHEDPEVKFNWYVDGVEVHNAKTKPREEQYNSTYRVVSVLTVLHQDWLNGKEYKCKVSNKALGAPIEKTISKAKGQPREPQVYTLPPSRDELTKNQVSLWCLVKGFYPSDIAVEWESNGQPENNYKTTPPVLDSDGSFFLYSKLTVDKSRWQQGNVFSCSVLHEALHSHYTQKSLSLSPGK

SEQ ID NO: 261 - protein, 227 aa, Artificial Sequence [sequence omitted]

SEQ ID NO: 262 - protein, 227 aa, Artificial Sequence
  source: /note="Description of Artificial Sequence: Synthetic polypeptide"
DKTHTCPPCPAPEAAGGPSVFLFPPKPKDTLMISRTPEVTCVVVDVSHEDPEVKFNWYVDGVEVHNAKTKPREEQYNSTYRVVSVLTVLHQDWLNGKEYKCKVSNKALPAPIEKTISKAKGQPREPQVYTLPPSRDELTKNQVSLWCLVKGFYPSDIAVEWESNGQPENNYKTTPPVLDSDGSFFLYSKLTVDKSRWQQGNVFSCSVMHEALHNHYTQKSLSLSPGK

SEQ ID NO: 263 - protein, 227 aa, Artificial Sequence
  source: /note="Description of Artificial Sequence: Synthetic polypeptide"
DKTHTCPPCPAPEAAGGPSVFLFPPKPKDTLMISRTPEVTCVVVDVSHEDPEVKFNWYVDGVEVHNAKTKPREEQYNSTYRVVSVLTVLHQDWLNGKEYKCKVSNKALGAPIEKTISKAKGQPREPQVYTLPPSRDELTKNQVSLWCLVKGFYPSDIAVEWESNGQPENNYKTTPPVLDSDGSFFLYSKLTVDKSRWQQGNVFSCSVMHEALHNHYTQKSLSLSPGK

SEQ ID NO: 264 - protein, 227 aa, Artificial Sequence
  source: /note="Description of Artificial Sequence: Synthetic polypeptide"
DKTHTCPPCPAPELLGGPSVFLFPPKPKDTLMISRTPEVTCVVVDVSHEDPEVKFNWYVDGVEVHNAKTKPREEQYNSTYRVVSVLTVLHQDWLNGKEYKCKVSNKALPAPIEKTISKAKGQPREPQVYTLPPSRDELTKNQVSLWCLVKGFYPSDIAVEWESNGQPENNYKTTPPVLDSDGSFFLYSKLTVDKSRWQQGNVFSCSVLHEALHSHYTQKSLSLSPGK

SEQ ID NO: 265 - protein, 227 aa, Artificial Sequence
  source: /note="Description of Artificial Sequence: Synthetic polypeptide"
DKTHTCPPCPAPEAAGGPSVFLFPPKPKDTLMISRTPEVTCVVVDVSHEDPEVKFNWYVDGVEVHNAKTKPREEQYNSTYRVVSVLTVLHQDWLNGKEYKCKVSNKALPAPIEKTISKAKGQPREPQVYTLPPSRDELTKNQVSLWCLVKGFYPSDIAVEWESNGQPENNYKTTPPVLDSDGSFFLYSKLTVDKSRWQQGNVFSCSVLHEALHSHYTQKSLSLSPGK

SEQ ID NO: 266 - protein, 227 aa, Artificial Sequence
  source: /note="Description of Artificial Sequence: Synthetic polypeptide"
DKTHTCPPCPAPEAAGGPSVFLFPPKPKDTLMISRTPEVTCVVVDVSHEDPEVKFNWYVDGVEVHNAKTKPREEQYNSTYRVVSVLTVLHQDWLNGKEYKCKVSNKALGAPIEKTISKAKGQPREPQVYTLPPSRDELTKNQVSLWCLVKGFYPSDIAVEWESNGQPENNYKTTPPVLDSDGSFFLYSKLTVDKSRWQQGNVFSCSVLHEALHSHYTQKSLSLSPGK

SEQ ID NO: 267 - protein, 227 aa, Artificial Sequence
  source: /note="Description of Artificial Sequence: Synthetic polypeptide"
DKTHTCPPCPAPELLGGPSVFLFPPKPKDTLMISRTPEVTCVVVDVSHEDPEVKFNWYVDGVEVHNAKTKPREEQYNSTYRVVSVLTVLHQDWLNGKEYKCKVSNKALPAPIEKTISKAKGQPREPQVYTLPPSRDELTKNQVSLSCAVKGFYPSDIAVEWESNGQPENNYKTTPPVLDSDGSFFLVSKLTVDKSRWQQGNVFSCSVMHEALHNHYTQKSLSLSPGK

SEQ ID NO: 268 - protein, 227 aa, Artificial Sequence
  source: /note="Description of Artificial Sequence: Synthetic polypeptide"
DKTHTCPPCPAPEAAGGPSVFLFPPKPKDTLMISRTPEVTCVVVDVSHEDPEVKFNWYVDGVEVHNAKTKPREEQYNSTYRVVSVLTVLHQDWLNGKEYKCKVSNKALPAPIEKTISKAKGQPREPQVYTLPPSRDELTKNQVSLSCAVKGFYPSDIAVEWESNGQPENNYKTTPPVLDSDGSFFLVSKLTVDKSRWQQGNVFSCSVMHEALHNHYTQKSLSLSPGK

SEQ ID NO: 269 - protein, 227 aa, Artificial Sequence
  source: /note="Description of Artificial Sequence: Synthetic polypeptide"
DKTHTCPPCPAPEAAGGPSVFLFPPKPKDTLMISRTPEVTCVVVDVSHEDPEVKFNWYVDGVEVHNAKTKPREEQYNSTYRVVSVLTVLHQDWLNGKEYKCKVSNKALGAPIEKTISKAKGQPREPQVYTLPPSRDELTKNQVSLSCAVKGFYPSDIAVEWESNGQPENNYKTTPPVLDSDGSFFLVSKLTVDKSRWQQGNVFSCSVMHEALHNHYTQKSLSLSPGK

SEQ ID NO: 270 - protein, 227 aa, Artificial Sequence
  source: /note="Description of Artificial Sequence: Synthetic polypeptide"
DKTHTCPPCPAPELLGGPSVFLFPPKPKDTLMISRTPEVTCVVVDVSHEDPEVKFNWYVDGVEVHNAKTKPREEQYNSTYRVVSVLTVLHQDWLNGKEYKCKVSNKALPAPIEKTISKAKGQPREPQVYTLPPSRDELTKNQVSLSCAVKGFYPSDIAVEWESNGQPENNYKTTPPVLDSDGSFFLVSKLTVDKSRWQQGNVFSCSVLHEALHSHYTQKSLSLSPGK

SEQ ID NO: 271 - protein, 227 aa, Artificial Sequence
  source: /note="Description of Artificial Sequence: Synthetic polypeptide"
DKTHTCPPCPAPEAAGGPSVFLFPPKPKDTLMISRTPEVTCVVVDVSHEDPEVKFNWYVDGVEVHNAKTKPREEQYNSTYRVVSVLTVLHQDWLNGKEYKCKVSNKALPAPIEKTISKAKGQPREPQVYTLPPSRDELTKNQVSLSCAVKGFYPSDIAVEWESNGQPENNYKTTPPVLDSDGSFFLVSKLTVDKSRWQQGNVFSCSVLHEALHSHYTQKSLSLSPGK

SEQ ID NO: 272 - protein, 227 aa, Artificial Sequence
  source: /note="Description of Artificial Sequence: Synthetic polypeptide"
DKTHTCPPCPAPEAAGGPSVFLFPPKPKDTLMISRTPEVTCVVVDVSHEDPEVKFNWYVDGVEVHNAKTKPREEQYNSTYRVVSVLTVLHQDWLNGKEYKCKVSNKALGAPIEKTISKAKGQPREPQVYTLPPSRDELTKNQVSLSCAVKGFYPSDIAVEWESNGQPENNYKTTPPVLDSDGSFFLVSKLTVDKSRWQQGNVFSCSVLHEALHSHYTQKSLSLSPGK

SEQ ID NO: 273 - protein, 227 aa, Artificial Sequence
  source: /note="Description of Artificial Sequence: Synthetic polypeptide"
DKTHTCPPCPAPELLGGPSVFLFPPKPKDTLMISRTPEVTCVVVDVSHEDPEVKFNWYVDGVEVHNAKTKPREEQYNSTYRVVSVLTVLHQDWLNGKEYKCKVSNKALPAPIEKTISKAKGQPREPQVYTLPPSRDELTKNQVSLWCLVKGFYPSDIAVLWESYGTEWSSYKTTPPVLDSDGSFFLYSKLTVTKEEWQQGFVFSCSVMHEALHNHYTQKSLSLSPGK

SEQ ID NO: 274 - protein, 813 aa, Artificial Sequence
  source: /note="Description of Artificial Sequence: Synthetic polypeptide"
DKTHTCPPCPAPELLGGPSVFLFPPKPKDTLMISRTPEVTCVVVDVSHEDPEVKFNWYVDGVEVHNAKTKPREEQYNSTYRVVSVLTVLHQDWLNGKEYKCKVSNKALPAPIEKTISKAKGQPREPQVYTLPPSRDELTKNQVSLWCLVKGFYPSDIAVLWESYGTEWSSYKTTPPVLDSDGSFFLYSKLTVTKEEWQQGFVFSCSVMHEALHNHYTQKSLSLSPGKGGGGSGGGGSTRCPDGQFCPVACCLDPGGASYSCCRPLLDKWPTTLSRHLGGPCQVDAHCSAGHSCIFTVSGTSSCCPFPEAVACGDGHHCCPRGFHCSADGRSCFQRSGNNSVGAIQCPDSQFECPDFSTCCVMVDGSWGCCPMPQASCCEDRVHCCPHGAFCDLVHTRCITPTGTHPLAKKLPAQRTNRAVALSSSVMCPDARSRCPDGSTCCELPSGKYGCCPMPNATCCSDHLHCCPQDTVCDLIQSKCLSKENATTDLLTKLPAHTVGDVKCDMEVSCPDGYTCCRLQSGAWGCCPFTQAVCCEDHIHCCPAGFTCDTQKGTCEQGPHQVPWMEKAPAHLSLPDPQALKRDVPCDNVSSCPSSDTCCQLTSGEWGCCPIPEAVCCSDHQHCCPQGYTCVAEGQCQRGSEIVAGLEKMPARRASLSHPRDIGCDQHTSCPVGQTCCPSLGGSWACCQLPHAVCCEDRQHCCPAGYTCNVKARSCEKEVVSAQPATFLARSPHVGVKDVECGEGHFCHDNQTCCRDNRQGWACCPYRQGVCCADRRHCCPAGFRCAARGTKCLRREAPRWDAPLRDPALRQLL

SEQ ID NO: 275 - protein, 813 aa, Artificial Sequence
  source: /note="Description of Artificial Sequence: Synthetic polypeptide"
TRCPDGQFCPVACCLDPGGASYSCCRPLLDKWPTTLSRHLGGPCQVDAHCSAGHSCIFTVSGTSSCCPFPEAVACGDGHHCCPRGFHCSADGRSCFQRSGNNSVGAIQCPDSQFECPDFSTCCVMVDGSWGCCPMPQASCCEDRVHCCPHGAFCDLVHTRCITPTGTHPLAKKLPAQRTNRAVALSSSVMCPDARSRCPDGSTCCELPSGKYGCCPMPNATCCSDHLHCCPQDTVCDLIQSKCLSKENATTDLLTKLPAHTVGDVKCDMEVSCPDGYTCCRLQSGAWGCCPFTQAVCCEDHIHCCPAGFTCDTQKGTCEQGPHQVPWMEKAPAHLSLPDPQALKRDVPCDNVSSCPSSDTCCQLTSGEWGCCPIPEAVCCSDHQHCCPQGYTCVAEGQCQRGSEIVAGLEKMPARRASLSHPRDIGCDQHTSCPVGQTCCPSLGGSWACCQLPHAVCCEDRQHCCPAGYTCNVKARSCEKEVVSAQPATFLARSPHVGVKDVECGEGHFCHDNQTCCRDNRQGWACCPYRQGVCCADRRHCCPAGFRCAARGTKCLRREAPRWDAPLRDPALRQLLGGGGSGGGGSDKTHTCPPCPAPELLGGPSVFLFPPKPKDTLMISRTPEVTCVVVDVSHEDPEVKFNWYVDGVEVHNAKTKPREEQYNSTYRVVSVLTVLHQDWLNGKEYKCKVSNKALPAPIEKTISKAKGQPREPQVYTLPPSRDELTKNQVSLWCLVKGFYPSDIAVLWESYGTEWSSYKTTPPVLDSDGSFFLYSKLTVTKEEWQQGFVFSCSVMHEALHNHYTQKSLSLSPGK

SEQ ID NO: 276 - protein, 10 aa, Artificial Sequence
  source: /note="Description of Artificial Sequence: Synthetic peptide"
GGGGSGGGGS

SEQ ID NO: 277 - protein, 5 aa, Artificial Sequence
  source: /note="Description of Artificial Sequence: Synthetic peptide"
GGGGS

SEQ ID NO: 278 - protein, 17 aa, Homo sapiens
MWTLVSWVALTAGLVAG

SEQ ID NO: 279 - protein, 56 aa, Homo sapiens
DVECGEGHFCHDNQTCCRDNRQGWACCPYRQGVCCADRRHCCPAGFRCAARGTKCL

SEQ ID NO: 280 - protein, 334 aa, Artificial Sequence
  source: /note="Description of Artificial Sequence: Synthetic polypeptide"
DKTHTCPPCPAPELLGGPSVFLFPPKPKDTLMISRTPEVTCVVVDVSHEDPEVKFNWYVDGVEVHNAKTKPREEQYNSTYRVVSVLTVLHQDWLNGKEYKCKVSNKALPAPIEKTISKAKGQPREPQVYTLPPSRDELTKNQVSLSCAVKGFYPSDIAVEWESNGQPENNYKTTPPVLDSDGSFFLVSKLTVDKSRWQQGNVFSCSVMHEALHNHYTQKSLSLSPGKGGGGSGGGGSKEVVSAQPATFLARSPHVGVKDVECGEGHFCHDNQTCCRDNRQGWACCPYRQGVCCADRRHCCPAGFRCAARGTKCLRREAPRWDAPLRDPALRQLL

SEQ ID NO: 281 - protein, 227 aa, Artificial Sequence
  source: /note="Description of Artificial Sequence: Synthetic polypeptide"
DKTHTCPPCPAPELLGGPSVFLFPPKPKDTLMISRTPEVTCVVVDVSHEDPEVKFNWYVDGVEVHNAKTKPREEQYNSTYRVVSVLTVLHQDWLNGKEYKCKVSNKALPAPIEKTISKAKGQPREPQVYTLPPSRDELTKNQVSLWCLVKGFYPSDIAVEWESYGTEWANYKTTPPVLDSDGSFFLYSKLTVTKEEWQQGFVFSCSVMHEALHNHYTQKSLSLSPGK

SEQ ID NO: 282 - protein, 227 aa, Artificial Sequence
  source: /note="Description of Artificial Sequence: Synthetic polypeptide"
DKTHTCPPCPAPEAAGGPSVFLFPPKPKDTLMISRTPEVTCVVVDVSHEDPEVKFNWYVDGVEVHNAKTKPREEQYNSTYRVVSVLTVLHQDWLNGKEYKCKVSNKALGAPIEKTISKAKGQPREPQVYTLPPSRDELTKNQVSLWCLVKGFYPSDIAVEWESYGTEWANYKTTPPVLDSDGSFFLYSKLTVTKEEWQQGFVFSCSVMHEALHNHYTQKSLSLSPGK

SEQ ID NO: 283 - protein, 227 aa, Artificial Sequence
  source: /note="Description of Artificial Sequence: Synthetic polypeptide"
DKTHTCPPCPAPELLGGPSVFLFPPKPKDTLMISRTPEVTCVVVDVSHEDPEVKFNWYVDGVEVHNAKTKPREEQYNSTYRVVSVLTVLHQDWLNGKEYKCKVSNKALPAPIEKTISKAKGQPREPQVYTLPPSRDELTKNQVSLWCLVKGFYPSDIAVEWESYGTEWANYKTTPPVLDSDGSFFLYSKLTVTKEEWQQGFVFSCSVLHEALHSHYTQKSLSLSPGK

SEQ ID NO: 284 - protein, 227 aa, Artificial Sequence
  source: /note="Description of Artificial Sequence: Synthetic polypeptide"
DKTHTCPPCPAPEAAGGPSVFLFPPKPKDTLMISRTPEVTCVVVDVSHEDPEVKFNWYVDGVEVHNAKTKPREEQYNSTYRVVSVLTVLHQDWLNGKEYKCKVSNKALPAPIEKTISKAKGQPREPQVYTLPPSRDELTKNQVSLWCLVKGFYPSDIAVEWESYGTEWANYKTTPPVLDSDGSFFLYSKLTVTKEEWQQGFVFSCSVLHEALHSHYTQKSLSLSPGK

SEQ ID NO: 285 - protein, 227 aa, Artificial Sequence
  source: /note="Description of Artificial Sequence: Synthetic polypeptide"
DKTHTCPPCPAPEAAGGPSVFLFPPKPKDTLMISRTPEVTCVVVDVSHEDPEVKFNWYVDGVEVHNAKTKPREEQYNSTYRVVSVLTVLHQDWLNGKEYKCKVSNKALGAPIEKTISKAKGQPREPQVYTLPPSRDELTKNQVSLWCLVKGFYPSDIAVEWESYGTEWANYKTTPPVLDSDGSFFLYSKLTVTKEEWQQGFVFSCSVLHEALHSHYTQKSLSLSPGK

SEQ ID NO: 286 - protein, 227 aa, Artificial Sequence
  source: /note="Description of Artificial Sequence: Synthetic polypeptide"
DKTHTCPPCPAPELLGGPSVFLFPPKPKDTLMISRTPEVTCVVVDVSHEDPEVKFNWYVDGVEVHNAKTKPREEQYNSTYRVVSVLTVLHQDWLNGKEYKCKVSNKALPAPIEKTISKAKGQPREPQVYTLPPSRDELTKNQVSLWCLVKGFYPSDIAVLWESYGTEWASYKTTPPVLDSDGSFFLYSKLTVTKEEWQQGFVFSCSVMHEALHNHYTQKSLSLSPGK

SEQ ID NO: 287 - protein, 227 aa, Artificial Sequence
  source: /note="Description of Artificial Sequence: Synthetic polypeptide"
DKTHTCPPCPAPEAAGGPSVFLFPPKPKDTLMISRTPEVTCVVVDVSHEDPEVKFNWYVDGVEVHNAKTKPREEQYNSTYRVVSVLTVLHQDWLNGKEYKCKVSNKALGAPIEKTISKAKGQPREPQVYTLPPSRDELTKNQVSLWCLVKGFYPSDIAVLWESYGTEWASYKTTPPVLDSDGSFFLYSKLTVTKEEWQQGFVFSCSVMHEALHNHYTQKSLSLSPGK

SEQ ID NO: 288 - protein, 227 aa, Artificial Sequence
  source: /note="Description of Artificial Sequence: Synthetic polypeptide"
DKTHTCPPCPAPELLGGPSVFLFPPKPKDTLMISRTPEVTCVVVDVSHEDPEVKFNWYVDGVEVHNAKTKPREEQYNSTYRVVSVLTVLHQDWLNGKEYKCKVSNKALPAPIEKTISKAKGQPREPQVYTLPPSRDELTKNQVSLWCLVKGFYPSDIAVLWESYGTEWASYKTTPPVLDSDGSFFLYSKLTVTKEEWQQGFVFSCSVLHEALHSHYTQKSLSLSPGK

SEQ ID NO: 289 - protein, 227 aa, Artificial Sequence
  source: /note="Description of Artificial Sequence: Synthetic polypeptide"
DKTHTCPPCPAPEAAGGPSVFLFPPKPKDTLMISRTPEVTCVVVDVSHEDPEVKFNWYVDGVEVHNAKTKPREEQYNSTYRVVSVLTVLHQDWLNGKEYKCKVSNKALPAPIEKTISKAKGQPREPQVYTLPPSRDELTKNQVSLWCLVKGFYPSDIAVLWESYGTEWASYKTTPPVLDSDGSFFLYSKLTVTKEEWQQGFVFSCSVLHEALHSHYTQKSLSLSPGK

SEQ ID NO: 290 - protein, 227 aa, Artificial Sequence
  source: /note="Description of Artificial Sequence: Synthetic polypeptide"
DKTHTCPPCPAPEAAGGPSVFLFPPKPKDTLMISRTPEVTCVVVDVSHEDPEVKFNWYVDGVEVHNAKTKPREEQYNSTYRVVSVLTVLHQDWLNGKEYKCKVSNKALGAPIEKTISKAKGQPREPQVYTLPPSRDELTKNQVSLWCLVKGFYPSDIAVLWESYGTEWASYKTTPPVLDSDGSFFLYSKLTVTKEEWQQGFVFSCSVLHEALHSHYTQKSLSLSPGK

SEQ ID NO: 291 - protein, 227 aa, Artificial Sequence
  source: /note="Description of Artificial Sequence: Synthetic polypeptide"
DKTHTCPPCPAPEAAGGPSVFLFPPKPKDTLMISRTPEVTCVVVDVSHEDPEVKFNWYVDGVEVHNAKTKPREEQYNSTYRVVSVLTVLHQDWLNGKEYKCKVSNKALPAPIEKTISKAKGQPREPQVYTLPPSRDELTKNQVSLWCLVKGFYPSDIAVLWESYGTEWSSYKTTPPVLDSDGSFFLYSKLTVTKEEWQQGFVFSCSVMHEALHNHYTQKSLSLSPGK

SEQ ID NO: 292 - protein, 227 aa, Artificial Sequence
  source: /note="Description of Artificial Sequence: Synthetic polypeptide"
DKTHTCPPCPAPEAAGGPSVFLFPPKPKDTLMISRTPEVTCVVVDVSHEDPEVKFNWYVDGVEVHNAKTKPREEQYNSTYRVVSVLTVLHQDWLNGKEYKCKVSNKALGAPIEKTISKAKGQPREPQVYTLPPSRDELTKNQVSLWCLVKGFYPSDIAVLWESYGTEWSSYKTTPPVLDSDGSFFLYSKLTVTKEEWQQGFVFSCSVMHEALHNHYTQKSLSLSPGK

SEQ ID NO: 293 - protein, 227 aa, Artificial Sequence
  source: /note="Description of Artificial Sequence: Synthetic polypeptide"
DKTHTCPPCPAPELLGGPSVFLFPPKPKDTLMISRTPEVTCVVVDVSHEDPEVKFNWYVDGVEVHNAKTKPREEQYNSTYRVVSVLTVLHQDWLNGKEYKCKVSNKALPAPIEKTISKAKGQPREPQVYTLPPSRDELTKNQVSLWCLVKGFYPSDIAVLWESYGTEWSSYKTTPPVLDSDGSFFLYSKLTVTKEEWQQGFVFSCSVLHEALHSHYTQKSLSLSPGK

SEQ ID NO: 294 - protein, 227 aa, Artificial Sequence
  source: /note="Description of Artificial Sequence: Synthetic polypeptide"
DKTHTCPPCPAPEAAGGPSVFLFPPKPKDTLMISRTPEVTCVVVDVSHEDPEVKFNWYVDGVEVHNAKTKPREEQYNSTYRVVSVLTVLHQDWLNGKEYKCKVSNKALPAPIEKTISKAKGQPREPQVYTLPPSRDELTKNQVSLWCLVKGFYPSDIAVLWESYGTEWSSYKTTPPVLDSDGSFFLYSKLTVTKEEWQQGFVFSCSVLHEALHSHYTQKSLSLSPGK

SEQ ID NO: 295 - protein, 227 aa, Artificial Sequence
  source: /note="Description of Artificial Sequence: Synthetic polypeptide"
DKTHTCPPCPAPEAAGGPSVFLFPPKPKDTLMISRTPEVTCVVVDVSHEDPEVKFNWYVDGVEVHNAKTKPREEQYNSTYRVVSVLTVLHQDWLNGKEYKCKVSNKALGAPIEKTISKAKGQPREPQVYTLPPSRDELTKNQVSLWCLVKGFYPSDIAVLWESYGTEWSSYKTTPPVLDSDGSFFLYSKLTVTKEEWQQGFVFSCSVLHEALHSHYTQKSLSLSPGK

SEQ ID NO: 296 - protein, 184 aa, Homo sapiens
AQNSVIIVDKNGRLVYLVENPGGYVAYSKAATVTGKLVHANFGTKKDFEDLYTPVNGSIVIVRAGKITFAEKVANAESLNAIGVLIYMDQTKFPIVNAELSFFGHAHLGTGDPYTPGFPSFNHTQFPPSRSSGLPNIPVQTISRAAAEKLFGNMEGDCPSDWKTDSTCRMVTSESKNVKLTVSN

SEQ ID NO: 297 - protein, 184 aa, Macaca mulatta
AQNSVIIVDKNGGLVYLVENPGGYVAYSKAATVTGKLVHANFGTKKDFEDLDSPVNGSIVIVRAGKITFAEKVANAESLNAIGVLIYMDQTKFPIVKADLSFFGHAHLGTGDPYTPGFPSFNHTQFPPSQSSGLPNIPVQTISRAAAEKLFGNMEGDCPSDWKTDSTCKMVTSENKSVKLTVSN

SEQ ID NO: 298 - protein, 184 aa, Pan troglodytes
AQNSVIIVDKNGSLVYLVENPGGYVAYSKAATVTGKLVHANFGTKKDFEDLHTPVNGSIVIVRAGKITFAEKVANAESLNAIGVLIYMDQTKFPIVNAELSFFGHAHLGTGDPYTPGFPSFNHTQFPPSRSSGLPNIPVQTVSRAAAEKLFGNMEGDCPSDWKTDSTCRMVTSESKNVKLTVSN

SEQ ID NO: 299 - protein, 184 aa, Macaca fascicularis; identical to SEQ ID NO: 297

SEQ ID NO: 300 - protein, 763 aa, Artificial Sequence
  source: /note="Description of Artificial Sequence: Synthetic polypeptide"
MMDQARSAFSNLFGGEPLSYTRFSLARQVDGDNSHVEMKLAADEEENADNNMKASVRKPKRFNGRLCFAAIALVIFFLIGFMSGYLGYCKRVEQKEECVKLAETEETDKSETMETEDVPTSSRLYWADLKTLLSEKLNSIEFADTIKQLSQNTYTPREAGSQKDESLAYYIENQFHEFKFSKVWRDEHYVKIQVKSSAQNSVIIVDKNGRLVYLVENPGGYVAYSKAATVTGKLVHANFGTKKDFEDLYTPVNGSIVIVRAGKITFAEKVANAESLNAIGVLIYMDQTKFPIVNAELSFFGHAHLGTGDPYTPGFPSFNHTQFPPSRSSGLPNIPVQTISRAAAEKLFGNMEGDCPSDWKTDSTCRMVTSESKNVKLTVSNVLKERRILNIFGVIKGYEEPDRYVVVGAQRDALGAGVAAKSSVGTGLLLKLAQVFSDMISKDGFRPSRSIIFASWTAGDFGAVGATEWLEGYLSSLHLKAFTYINLDKVVLGTSNFKVSASPLLYTLMGKIMQDVKHPVDGKSLYRDSNWISKVEKLSFDNAAYPFLAYSGIPAVSFCFCEDADYPYLGTRLDTYEALTQKVPQLNQMVRTAAEVAGQLIIKLTHDVELNLDYEMYNSKLLSFMKDLNQFKTDIRDMGLSLQWLYSARGDYFRATSRLTTDFHNAEKTNRFVMREINDRIMKVEYHFLSPYVSPRESPFRHIFWGSGSHTLSALVENLKLRQKNITAFNETLFRNQLALATWTIQGVANALSGDIWNIDNEF

SEQ ID NO: 301 - DNA, 552 bp, Homo sapiens
gctcagaactccgtgatcatcgtggataagaacggccggctggtgtacctggtggagaaccctggcggatacgtggcttactctaaggccgctaccgtgacaggcaagctggtgcacgccaacttcggaaccaagaaggactttgaggatctgtacacaccagtgaacggctctatcgtgatcgtgcgcgctggaaagatcaccttcgccgagaaggtggctaacgccgagagcctgaacgccatcggcgtgctgatctacatggatcagacaaagtttcccatcgtgaacgctgagctgtctttctttggacacgctcacctgggcaccggagacccatacacacccggattccctagctttaaccacacccagttccccccttccaggtctagcggactgccaaacatccccgtgcagacaatcagcagagccgctgccgagaagctgtttggcaacatggagggagactgcccctccgattggaagaccgactctacatgtaggatggtgacctccgagtcaaaaaatgtcaaactcaccgtgtccaat

SEQ ID NO: 302 - protein, 7 aa, Unknown
  source: /note="Description of Unknown: motif sequence"
  MOD_RES (2)..(2): Any amino acid
YXTEWSS

SEQ ID NO: 303 - protein, 6 aa, Artificial Sequence
  source: /note="Description of Artificial Sequence: Synthetic 6xHis tag"
HHHHHH

SEQ ID NO: 304 - protein, 4 aa, Artificial Sequence
  source: /note="Description of Artificial Sequence: Synthetic peptide"
GGSG

SEQ ID NO: 305 - protein, 4 aa, Artificial Sequence
  source: /note="Description of Artificial Sequence: Synthetic peptide"
SGGG

SEQ ID NO: 306 - protein, 18 aa, Artificial Sequence
  source: /note="Description of Artificial Sequence: Synthetic peptide"
KESGSVSSEQLAQFRSLD

SEQ ID NO: 307 - protein, 14 aa, Artificial Sequence
  source: /note="Description of Artificial Sequence: Synthetic peptide"
EGKSSGSGSESKST

SEQ ID NO: 308 - protein, 12 aa, Artificial Sequence
  source: /note="Description of Artificial Sequence: Synthetic peptide"
GSAGSAAGSGEF

SEQ ID NO: 309 - protein, 7 aa, Artificial Sequence
  source: /note="Description of Artificial Sequence: Synthetic peptide"
AEAAAKA

1-159. (canceled)

160. A protein comprising:
(a) a first Fc polypeptide that is linked to a progranulin polypeptide or a variant thereof, and
(b) a second Fc polypeptide that forms an Fc dimer with the first Fc polypeptide, wherein the second Fc polypeptide specifically binds to a transferrin receptor.

161. The protein of claim 160, wherein the protein comprises exactly one progranulin polypeptide or variant thereof.

162. The protein of claim 160, wherein the second Fc polypeptide is linked to a second progranulin polypeptide or variant thereof.

163. The protein of claim 160, wherein the first Fc polypeptide and the second Fc polypeptide do not include an immunoglobulin heavy and/or light chain variable region sequence or an antigen-binding portion thereof.

164. The protein of claim 160, wherein the progranulin polypeptide comprises an amino acid sequence having at least 90% identity, or at least 95% identity to the amino acid sequence of SEQ ID NO:212.

165. The protein of claim 160, wherein the first Fc polypeptide is linked to the progranulin polypeptide or the variant thereof by a peptide bond or by a polypeptide linker.

166. The protein of claim 165, wherein the polypeptide linker is 1 to 50 amino acids in length.

167. The protein of claim 165, wherein the polypeptide linker is a flexible polypeptide linker.

168. The protein of claim 167, wherein the flexible polypeptide linker is a glycine-rich linker.

169. The protein of claim 160, wherein the N-terminus or the C-terminus of the first Fc polypeptide is linked to the progranulin polypeptide.

170. The protein of claim 162, wherein the N-terminus or the C-terminus of the second Fc polypeptide is linked to the second progranulin polypeptide.

171. The protein of claim 160, wherein the first Fc polypeptide and the second Fc polypeptide each contain modifications that promote heterodimerization.

172. The protein of claim 171, wherein one of the Fc polypeptides has a T366W substitution and the other Fc polypeptide has T366S, L368A, and Y407V substitutions, according to EU numbering.

173. The protein of claim 172, wherein the first Fc polypeptide contains the T366S, L368A, and Y407V substitutions and the second Fc polypeptide contains the T366W substitution.

174. The protein of claim 173, wherein the first Fc polypeptide is linked to the progranulin polypeptide and comprises the amino acid sequence of any one of SEQ ID NOS:213, 214, 225, and 226, and the second Fc polypeptide comprises the amino acid sequence of SEQ ID NO:261.

175. The protein of claim 160, wherein the first Fc polypeptide and/or the second Fc polypeptide comprises a native FcRn binding site.

176. The protein of claim 160, wherein the first Fc polypeptide and/or the second Fc polypeptide includes a modification that reduces effector function.

177. The protein of claim 176, wherein the modification that reduces effector function is the substitutions of Ala at position 234 and Ala at position 235, according to EU numbering.

178. The protein of claim 160, wherein the first Fc polypeptide and/or the second Fc polypeptide comprises amino acid changes relative to the native Fc sequence that extend serum half-life.

179. The protein of claim 178, wherein:
(a) the amino acid changes comprise substitutions of Leu at position 428 and Ser at position 434, according to EU numbering; or
(b) the amino acid changes comprise a substitution of Ser or Ala at position 434, according to EU numbering.

180. The protein of claim 160, wherein the second Fc polypeptide binds to the apical domain of the transferrin receptor.

181. The protein of claim 180, wherein the second Fc polypeptide comprises at least two substitutions at positions selected from the group consisting of 384, 386, 387, 388, 389, 390, 413, 416, and 421, according to EU numbering.

182. The protein of claim 181, wherein the second Fc polypeptide includes substitutions at at least three, four, five, six, seven, eight, or nine of the positions.

183. The protein of claim 181, wherein the second Fc polypeptide further comprises one, two, three, or four substitutions at positions comprising 380, 391, 392, and 415, according to EU numbering.

184. The protein of claim 181, wherein the second Fc polypeptide further comprises one, two, or three substitutions at positions comprising 414, 424, and 426, according to EU numbering.

185. The protein of claim 181, wherein the second Fc polypeptide comprises (i) Trp at position 388 and/or (ii) an aromatic amino acid at position 421.

186. The protein of claim 185, wherein the aromatic amino acid at position 421 is Trp or Phe.

187. The protein of claim 181, wherein the second Fc polypeptide comprises at least one position selected from the following: position 380 is Trp, Leu, or Glu; position 384 is Tyr or Phe; position 386 is Thr; position 387 is Glu; position 388 is Trp; position 389 is Ser, Ala, Val, or Asn; position 390 is Ser or Asn; position 413 is Thr or Ser; position 415 is Glu or Ser; position 416 is Glu; and position 421 is Phe.

188. The protein of claim 187, wherein the second Fc polypeptide comprises 2, 3, 4, 5, 6, 7, 8, 9, 10, or 11 positions selected from the following: position 380 is Trp, Leu, or Glu; position 384 is Tyr or Phe; position 386 is Thr; position 387 is Glu; position 388 is Trp; position 389 is Ser, Ala, Val, or Asn; position 390 is Ser or Asn; position 413 is Thr or Ser; position 415 is Glu or Ser; position 416 is Glu; and position 421 is Phe.

189. The protein of claim 188, wherein the second Fc polypeptide comprises 11 positions as follows: position 380 is Trp, Leu, or Glu; position 384 is Tyr or Phe; position 386 is Thr; position 387 is Glu; position 388 is Trp; position 389 is Ser, Ala, Val, or Asn; position 390 is Ser or Asn; position 413 is Thr or Ser; position 415 is Glu or Ser; position 416 is Glu; and position 421 is Phe.

190. The protein of claim 188, wherein the second Fc polypeptide has a CH3 domain with at least 85% identity, at least 90% identity, or at least 95% identity to amino acids 111-217 of any one of SEQ ID NOS:34-38, 58, 60-90, 136, and 137-210.

191. The protein of claim 190, wherein the residues at at least 5, 6, 7, 8, 9, 10, 11, 12, 13, 14, 15, or 16 of the positions corresponding to EU index positions 380, 384, 386, 387, 388, 389, 390, 391, 392, 413, 414, 415, 416, 421, 424 and 426 of any one of SEQ ID NOS:34-38, 58, 60-90, 136, and 137-210 are not deleted or substituted.

192. The protein of claim 190, wherein the second Fc polypeptide comprises the amino acid sequence of any one of SEQ ID NOS:136-210.

193. The protein of claim 192, wherein the second Fc polypeptide comprises the amino acid sequence of any one of SEQ ID NOS:136, 138, 150, 162, 174, 186, and 198.

194. The protein of claim 160, wherein the binding of the protein to the transferrin receptor does not substantially inhibit binding of transferrin to the transferrin receptor.

195. The protein of claim 160, wherein the progranulin polypeptide or the variant thereof binds to sortilin or prosaposin.

196. The protein of claim 160, wherein (a) comprises the sequence of any one of SEQ ID NOS:213, 214, 225, and 226 and (b) comprises the sequence of SEQ ID NO:281 or 286.

197. The protein of claim 196, wherein the first Fc polypeptide and/or the second Fc polypeptide further comprises L234A and L235A mutations with or without P329G mutation, and/or M428L and N434S mutations, according to EU numbering scheme.

198. The protein of claim 197, wherein:
(i) (a) comprises the sequence of any one of SEQ ID NOS:213, 214, 225, and 226 and (b) comprises the sequence of any one of SEQ ID NOS:209, 210, 282-285, and 287-291; or
(ii) (a) comprises the sequence of any one of SEQ ID NOS:215-224 and 227-236 and (b) comprises the sequence of SEQ ID NO:281 or 286; or
(iii) (a) comprises the sequence of any one of SEQ ID NOS:215-224 and 227-236 and (b) comprises the sequence of SEQ ID NO:209, 210, 282-285, and 287-291.

199. A polypeptide comprising an Fc polypeptide that is linked to a progranulin polypeptide or a variant thereof, wherein the Fc polypeptide contains one or more modifications that promote its heterodimerization to another Fc polypeptide.

200. A method of treating a progranulin-associated disorder, the method comprising administering the protein of claim 160 to a patient in need thereof, wherein the progranulin-associated disorder is selected from the group consisting of a neurodegenerative disease, atherosclerosis, a disorder associated with TDP-43, and age-related macular degeneration (AMD).

201. A method of increasing the amount of a progranulin polypeptide or a variant thereof in a patient having a progranulin-associated disorder, the method comprising administering the protein of claim 160 to the patient, wherein the progranulin-associated disorder is selected from the group consisting of a neurodegenerative disease, atherosclerosis, a disorder associated with TDP-43, and age-related macular degeneration (AMD).

202. A method of decreasing cathepsin D activity in a patient having a progranulin-associated disorder, the method comprising administering the protein of claim 160 to the patient, wherein the progranulin-associated disorder is selected from the group consisting of a neurodegenerative disease, atherosclerosis, a disorder associated with TDP-43, and age-related macular degeneration (AMD).

203. A method of increasing lysosomal degradation in a patient having a progranulin-associated disorder, the method comprising administering the protein of claim 160 to the patient, wherein the progranulin-associated disorder is selected from the group consisting of a neurodegenerative disease, atherosclerosis, a disorder associated with TDP-43, and age-related macular degeneration (AMD).

204. A pharmaceutical composition comprising the protein of claim 160 and a pharmaceutically acceptable carrier.
